(19) United States
(12) Patent Application Publication
(10) Pub. No.: US 2006/0263864 A1
(43) Pub. Date: Nov. 23, 2006

(54) Methods for improving secondary metabolite production of fungi

(76) Inventors: Robert Busby, Weymouth, MA (US); Brian Cali, Arlington, MA (US); Peter Hecht, Newton, MA (US); Douglas Holtzman, Jamaica Plain, MA (US); Kevin T. Madden, Arlington, MA (US); Mary Maxon, San Francisco, CA (US); G. Todd Milne, Brookline, MA (US); Thea Norman, Belmont, MA (US); John C. Royer, Lexington, MA (US); Jeff Silva, Beverly, MA (US); Eric F. Summers, Brookline, MA (US); Lixin Zhang, Lexington, MA (US); Maria Mayorga, Somerville, MA (US); Toby Feibelman, Lincoln, MA (US); Reed Doten, Framingham, MA (US)

Correspondence Address: FISH & RICHARDSON PC, P.O. BOX 1022, MINNEAPOLIS, MN, 55440-1022, US

(21) Appl. No.: 10/309,407

(22) Filed: Dec. 3, 2002

Related U.S. Application Data
(63) Continuation of application No. 09/691,499, filed on Oct. 18, 2000, now abandoned.
Application No. 09/691,499 is a continuation-in-part of application No. 09/487,558, filed on Jan. 19, 2000, now Pat. No. 6,949,356.
(60) Provisional application No. 60/160,587, filed on Oct. 20, 1999.

(51) Int. Cl. C12P 17/06; C12P 7/62; C12N 15/74; C12N 1/16

(52) U.S. Cl. 435/125; 435/135; 435/484; 435/254.3

(57) ABSTRACT

Methods for improving secondary metabolite production by modulating certain genes involved in secondary metabolite production, including genes encoding CreA, AreA, GanB, Gna3, FadA, Gna1, Gpa1, RfeH, An09, PacC, Lys14, LovU, Ste7, Pde2, Nc1, Vps34 and fungal homologs thereof.

### RELATED APPLICATION INFORMATION

[0001] This application is a continuation-in-part of U.S. application Ser. No. 09/691,499, filed Oct. 18, 2000, which is a continuation-in-part of U.S. application Ser. No. 09/487,558, filed Jan. 19, 2000, which claims priority from U.S. provisional application Ser. No. 60/160,587, filed Oct. 20, 1999, all of which are hereby incorporated by reference.

### TECHNICAL FIELD

[0002] The invention relates to the production of secondary metabolites by fungi. More particularly, the invention relates to improvement of production of commercially important secondary metabolites by fungi.

### BACKGROUND

[0003] Secondary metabolite production by various fungi has been an extremely important source of a variety of therapeutically significant pharmaceuticals. β-lactam antibacterials such as penicillin and cephalosporin are produced by Penicillium chrysogenum and Acremonium chrysogenum, respectively, and these compounds are by far the most frequently used antibacterials (reviewed in Luengo and Penalva, Prog. Ind. Microbiol. 29: 603-38 (1994); Jensen and Demain, Biotechnology 28: 239-68 (1995); Brakhage, Microbiol. Mol. Biol. Rev. 62: 547-85 (1998)). Cyclosporin A, a member of a class of cyclic undecapeptides, is produced by Tolypocladium inflatum. Cyclosporin A dramatically reduces morbidity and increases survival rates in transplant patients (Borel, Prog. Allergy 38: 9-18 (1986)). In addition, several fungal secondary metabolites are cholesterol lowering drugs, including lovastatin that is made by Aspergillus terreus and several other fungi (Alberts et al., Proc. Natl. Acad. Sci. USA 77: 3957-3961 (1980)). These and many other fungal secondary metabolites have contributed greatly to health care throughout the world (see Demain, Ciba Found Symp 171: 3-16 (1992); Bentley, Crit. Rev. Biotechnol. 19: 1-40 (1999)).

[0004] Unfortunately, many challenges are encountered between the detection of a secondary metabolite activity to production of significant quantities of pure drug. Thus, efforts have been made to improve the production of secondary metabolites by fungi. Some of these efforts have attempted to improve production by modification of the growth medium or the bioreactor used to carry out the fermentation. Buckland et al., in Topics in Industrial Microbiology: Novel Microbial products for Medicine and Agriculture, pp. 161-169, Elsevier, Amsterdam (1989) discloses improved lovastatin production by modification of carbon source and also teaches the superiority of a hydrofoil axial flow impeller in the bioreactor. Other efforts have involved strain improvements, either through re-isolation or random mutagenesis. Agathos et al., J. Ind. Microbiol. 1: 39-48 (1986), teaches that strain improvement and process development together resulted in a ten-fold increase in cyclosporin A production. While important, studies of these types have still left much room for improvement in the production of secondary metabolites.

[0005] More recently, strains have been improved by manipulation of the genes encoding the biosynthetic enzymes that catalyze the reactions required for production of secondary metabolites. Penalva et al., Trends Biotechnol. 16: 483-489 (1998) discloses that production strains of P. chrysogenum have increased copy number of the penicillin synthesis structural genes. Other studies have modulated expression of other biosynthetic enzyme-encoding genes, thereby affecting overall metabolism in the fungus. Mingo et al., J. Biol. Chem. 21: 14545-14550 (1999), demonstrate that disruption of phacA, a gene required for phenylacetate catabolism in A. nidulans, leads to increased penicillin production, probably by allowing increased availability of phenylacetate for secondary metabolism. Similarly, disruption of the gene encoding aminoadipate reductase in P. chrysogenum increased penicillin production, presumably by eliminating competition for the substrate alpha-aminoadipate (Casquiero et al., J. Bacteriol. 181: 1181-1188 (1999)).

[0006] Thus, genetic manipulation holds promise for improving production of secondary metabolites. Genetic manipulation to increase the activity of biosynthetic enzymes for secondary metabolite production or to decrease the activity of competing biosynthetic pathways has proven effective for improving production. Maximum benefit might be achieved by combining several strategies of manipulation. For example, modulating the expression of genes that regulate the biosynthetic enzyme-encoding genes might improve production. In addition, genetic manipulation could be used to impact upon the challenges that are encountered in the fermentor run or downstream processing (e.g. energy cost, specific production of desired metabolite, maximal recovery of metabolite, cost of processing waste from fermentations). There is, therefore, a need for methods for improving secondary metabolite production in a fungus, comprising modulating the expression of a gene involved in regulation of secondary metabolite production. Ideally, such methods should be able to provide a means to modulate parameters important in production of secondary metabolites, including, yield, productivity, efflux/excretion, production of side products or non-desired secondary metabolites, strain characteristics such as morphology, conditional lysis, or resistance to the deleterious effects of exposure to a secondary metabolite.

### SUMMARY

[0007] The invention provides methods for improving secondary metabolite production in a fungus, comprising modulating the expression of a gene involved in regulation of secondary metabolite production. The methods according to the invention provide increased yield, increased productivity, increased efflux/excretion, decreased production of side products or non-desired secondary metabolites, altered strain characteristics and/or conditional lysis, or increased resistance to the deleterious effects of exposure to a secondary metabolite.

[0008] The several aspects of the methods according to the invention are preferably achieved by overexpression of regulatory genes, expression of dominant mutant variants of regulatory genes, use of peptide activators or inhibitors of regulatory gene function, use of small molecule activators or inhibitors of regulatory gene function, and conditional expression of regulatory genes. These factors preferably are or modulate transcription factors, transmembrane transporters, proteins that mediate secretion, kinases, G-proteins, cell surface receptors, GTPase activating proteins, guanine nucleotide exchange factors, phosphatases, proteases, phosphodiesterases, bacterial protein toxins, importins, RNA-binding proteins, SCF complex components, adherins, or biosynthetic pathways.

[0009] The methods of the invention can be used to improve production of any secondary metabolite, including, lovastatin, penicillin, geodin, norsolorinic acid, N-Acetylvalyl-N-[2-(1H-indol-3-yl)ethenyl]-N^{É}-methylphenylalaninamide (CAS 124727-69-1; a modified tripeptide), methyl 3,4,5-trimethoxy-2-[[2-[(3pyridinylcarbonylamino]benzoyl]amino]benzoate (CAS 81469-77-1; an alkaloid), and osoic acid 3-methyl ether, 1-methyl ester (CAS 577-64-0; a polyketide).

[0010] The invention further provides for achieving the aspects described in the invention by combinatorial manipulation. Combinatorial manipulation is the simultaneous use of multiple methods and/or multiple factors to achieve the aspects of the invention. Methods for achieving the aspects of the invention are preferably by the overexpression of regulatory genes, expression of dominant mutant variants of regulatory genes, use of peptide activators or inhibitors, use of small molecule activators or inhibitors, and conditional expression of regulatory genes. The preferred factors are as described above.

[0011] The invention further provides genetically modified fungi, wherein the genetically modified fungi have an ability to produce secondary metabolites and the ability of the genetically modified fungus to produce secondary metabolites has been improved by any of the methods according to the invention.

[0012] The invention also provides a method for making a secondary metabolite, the method comprising culturing a genetically modified fungus according to the invention under conditions suitable for the production of secondary metabolites.

[0013] The details of one or more embodiments of the invention are set forth in the accompanying drawings and the description below. Other features, objects, and advantages of the invention will be apparent from the description and drawings, and from the claims.

### DESCRIPTION OF DRAWINGS

[0014] FIG. 1 shows the ability of PUMP1 (AAD34558) from Aspergillus terreus to confer lovastatin resistance to a yeast strain.

[0015] FIG. 2 shows the impact of yeast genetics and genomics on fungal genetics. Arrows indicate which genes or gene products act on other genes or gene products.

[0016] FIG. 3 shows representative box plots presentations of lovastatin production data from shake flask experiments. Data from strains that express a particular regulator (e.g., pacCVP16) are displayed with appropriate negative (EMPTY or GUS) and positive (lovE) controls from the same shake flask experiment.

[0017] FIG. 4 is a pair of graphs depicting the effect of CreA expression on lovastatin production in A. terreus.

[0018] FIG. 5 is a pair of graphs depicting the effect of AreA expression on lovastatin production in A. terreus.

[0019] FIG. 6 is a pair of graphs depicting the effect of pacC on lovastatin production in A. terreus.

[0020] FIG. 7 is a set of graphs depicting the effect of ganB, ganB^{G45R}, gna3, and gna3^{G44R} expression on lovastatin production in A. terreus.

[0021] FIG. 8 is a set of graphs depicting the effect of fadA^{G42R}, gpa1^{G42R}, gpa1^{Q204L}, and gna1^{G42R} expression on lovastatin production in A. terreus.

[0022] FIG. 9 is a set of graphs depicting the effect of inducible expression of gna3^{G44R} on lovastatin production. in A. terreus

[0023] FIG. 10 is a set of graphs depicting the effect of rfeH (Pc23) expression on lovastatin production in A. terreus.

[0024] FIG. 11 is a set of graphs depicting the effect of VP16-rfeC (An09) and rfeC expression on lovastatin production in A. terreus.

[0025] FIG. 12 is a set of graphs depicting the effect various regulators on norsolorinic acid production in A. terreus.

[0026] FIG. 13 is a set of graphs depicting the effect of various regulators on lovastatin production in A. terreus.

[0027] FIG. 14 is set of graphs depicting the effect of various regulators on penicillin production in P. chrysogenum.

[0028] FIG. 15 is set of graphs depicting the effect of Ustilago maydis ste7 expression on lovastatin production in A. terreus.

[0029] FIG. 16 is set of graphs depicting the effect of S. cerevisiae VPS34 expression on lovastatin production in A. terreus.

[0030] FIG. 17 is set of graphs depicting the effect of N. crassa nc1 expression on lovastatin production in A. terreus.

[0031] FIG. 18 is set of graphs depicting the effect of S. cerevisiae PDE2 expression on lovastatin production in A. terreus.

### DETAILED DESCRIPTION

[0032] The invention relates to the production of secondary metabolites by fungi. More particularly, the invention relates to improvement of production of commercially important secondary metabolites by fungi. The references cited herein evidence the level of knowledge in the field and are therefore incorporated by reference in their entirety. In the event of a conflict between a cited reference and the present specification, the latter shall prevail.

[0033] The invention provides methods for improving secondary metabolite production in a fungus, comprising modulating the expression of a gene involved in regulation of secondary metabolite production. In certain embodiments, the methods comprise modulating the expression of more than one gene involved in regulation of secondary metabolite production.

[0034] Methods for Improving Secondary Metabolite Production by Improving Yield of the Metabolite

[0035] In a first aspect, the invention provides methods for improving production of a secondary metabolite by a fungus by increasing the yield of the secondary metabolite produced by the fungus. The methods according to this aspect of the invention comprise modulating the expression of a gene involved in regulation of secondary metabolite production in a manner that improves the yield of the secondary metabolite.

[0036] Preferably, for this aspect of the invention, when the secondary metabolite is isopenicillin N, then the modulation is not mediated by the transcription factor CPCR1; when the secondary metabolite is sterigmatocystin, then the modulation is not through AflR, FadA, or FluG; when the secondary metabolite is aflatoxin, then the modulation is not through AflR; when the secondary metabolite is penicillin and the fungus is Aspergillus nidulans, then the modulation is not through mutations that result in expression of truncated forms of PacC or constitutively active forms of FadA; when the gene involved in regulation of secondary metabolite production is from Saccharomyces cerevisiae, then the modulation is not through decreased activity or expression of Bem2, Hog1, Ira1, Rim15, Sfl1, Srb11, Ssd1, Swi4, Tpk3 or though increased activity or expression of Afl1, Cdc25, Dhh1, Hap4, Inv11, Inv13, Inv5, Inv7, Inv9, Mcm1, Mep2, Mga1, Msn1, Msn5, Mss11, Pet9, Pho23, Ptc1, Rim101, Rim13, Rim9, Snf8, Stp22, Tpk2, Vps28, Vps36, or Ypr1; and when the secondary metabolite is lovastatin and the fungus is A. terreus, the modulation is not mediated by lovE.

[0037] As used herein, the phrase “modulate production of a secondary metabolite” refers to a positive or negative or desirable change in one or more of the variables or values that affect the process or results of production of the secondary metabolite in a liquid or solid state fungal fermentation. These positive or negative or desirable changes include, without limitation, an increase or decrease in the amount of a secondary metabolite being produced (in absolute terms or in quantity per unit volume of fermentation broth or per unit mass of solid substrate); a decrease in the volume of the broth or the mass/quantity of substrate required for the production of sufficient quantities; a decrease in the cost of raw materials and energy, the time of fermentor or culture run, or the amount of waste that must be processed after a fermentor run; an increase or decrease in the specific production of the desired metabolite (both in total amounts and as a fraction of all metabolites and side products made by the fungus); an increase or decrease in the percent of the produced secondary metabolite that can be recovered from the fermentation broth or culture; and an increase in the resistance of an organism producing a secondary metabolite to possible deleterious effects of contact with the secondary metabolite.

[0038] A “secondary metabolite” is a compound, derived from primary metabolites, that is produced by an organism, is not a primary metabolite, is not ethanol or a fusel alcohol, and is not required for growth under standard conditions. Secondary metabolites are derived from intermediates of many pathways of primary metabolism. These pathways include, without limitation, pathways for biosynthesis of amino acids, the shikimic acid pathway for biosynthesis of aromatic amino acids, the polyketide biosynthetic pathway from acetyl coenzyme A (CoA), the mevalonic acid pathway from acetyl CoA, and pathways for biosynthesis of polysaccharides and peptidopolysaccharides. Collectively, secondary metabolism involves all primary pathways of carbon metabolism (Fungal Physiology, Chapter 9 pp 246-274 ed DH Griffin (1994)). “Secondary metabolites” also include intermediate compounds in the biosynthetic pathway for a secondary metabolite that are dedicated to the pathway for synthesis of the secondary metabolite. “Dedicated to the pathway for synthesis of the secondary metabolite” means that once the intermediate is synthesized by the cell, the cell will not convert the intermediate to a primary metabolite. “Intermediate compounds” also include secondary metabolite intermediate compounds which can be converted to useful compounds by subsequent chemical conversion or subsequent biotransformation. As such, providing improved availability of such intermediate compounds would still lead to improved production of the ultimate useful compound, which itself may be referred to herein as a secondary metabolite. The yeast Saccharomyces cerevisiae is not known to produce secondary metabolites. The term “primary metabolite” means a natural product that has an obvious role in the functioning of almost all organisms. Primary metabolites include, without limitation, compounds involved in the biosynthesis of lipids, carbohydrates, proteins, and nucleic acids. The term “increasing the yield of the secondary metabolite” means increasing the quantity of the secondary metabolite present in the total fermentation broth per unit volume of fermentation broth.

[0039] A “gene involved in regulation of secondary metabolite production” is a gene, other than a gene encoding a biosynthetic enzyme for the secondary metabolite to be produced, which modulates secondary metabolite production involving yield, productivity, efflux/excretion, production of side products or non-desired secondary metabolites, strain characteristics and/or conditional lysis, or resistance to the deleterious effects of exposure to a secondary metabolite. A “biosynthetic enzyme for the secondary metabolite to be produced” is a molecule that catalyzes the conversion of a substrate to a product, including an intermediate product, in the biosynthetic pathway for the secondary metabolite for which production is being improved. An alternative term, “biosynthetic enzyme”, as used herein refers to a molecule that catalyzes the conversion of a substrate to a product, including an intermediate product, in a biosynthetic pathway other than the biosynthetic pathway for the secondary metabolite for which production is being improved.

[0040] As used for all aspects of the invention, the term “modulating the expression of a gene” means affecting the function of a gene's product, preferably by increasing or decreasing protein activity through mutation, creating a new protein activity through mutation; increasing or decreasing transcription, increasing or decreasing translation, increasing or decreasing post-translational modification, altering intracellular localization, increasing or decreasing translocation from one cellular location to another, increasing or decreasing protein activity by interaction of the protein with another molecule, or creating a new protein activity by interaction of the protein with another molecule. In some cases, such modulation is achieved simply by allowing or causing the expression of an exogenously supplied nucleic acid or gene. In some cases other exogenously supplied molecules may mediate the modulation. The modulation is not achieved, however, by simply randomly mutagenizing the fungus, either spontaneously or by chemical means.

[0041] As used for all aspects of the invention, “mutation” means an alteration in DNA sequence, either by site-directed or random mutagenesis. Mutation encompasses point mutations as well as insertions, deletions, or rearrangements. A “mutant” is an organism containing one or more mutations.

[0042] In certain embodiments of the methods according to this aspect of the invention, the modulation is overexpression of the gene. “Overexpression of the gene” means transcription and/or translation and/or gene product maturation at a rate that exceeds by at least two-fold, preferably at least five-fold, and more preferably at least ten-fold, the level of such expression that would be present under similar growth conditions in the absence of the modulation of expression of the gene. In instances where heterologous genes are being expressed, any level of expression is, by definition, considered overexpression.

[0043] “Similar growth conditions” means similar sources of nutrients such as carbon, nitrogen, and phosphate, as well as similar pH, partial oxygen pressure, temperature, concentration of drugs or other small molecules, and a similar substrate for growth, whether solid, semi-solid, or liquid.

[0044] Preferred genes according to this aspect of the invention include, without limitation, AAD34561, AAD34562, abaA, ACE2, ADR1, AFL1, aflR, AFT1, amyR, areA, ASH1, BAP2, BCY1, CAT8, CDC24, CDC25, CDC28, CDC42, CDC55, CLB2, creA, CTS1, CUP9, CYR1, DFG16, DHH1, DPH3, ELM1, facB, FLO1, FLO11, FLO8, FUS3, GCN2, GCN4, GCR1, GCR2, GLN3, GPA1, GPA2, GPR1, GRR1, GTS1, HAP1, HAP4, HIP1, HMS1, HMS2, HOG1, HSL1, HXK2, IME1, IME4, INO2, INV11, INV13, INV16, INV5, INV7, INV9, KSS1, LEU3, lovE, LYS14, MAC1, MCM1, MEP1, MEP2, MET28, MET31, MET4, metR, MGA1, MIG1, MIG2, MSN1, MSN2, MSN4, MSN5, MSS11, MTH1, NPR1, nreB, NRG1, OAF1, pacC, PBS2, PDE2, PET9, PHD1, PHO2, PHO4, PHO85, pkaR, PPR1, PTC1, PUT3, RAS1, RAS2, RGS2, RIM101, RIM13, RIM15, RIM9, ROX1, RRE1, SCH9, sconB, SFL1, SHO1, SHR3, SIN3, SIP4, SKN7, SNF1, SNF2, SNF7, SNF8, SOK2, SRB10, SRB11, SRB8, SRB9, sreA, sreP, SRV2, SSD1, SSN6, SST2, STE11, STE11, STE20, STE50, STE7, STP22, SWI4, SWI6, tamA, TEC1, TPK1, TPK2, TPK3, TUP1, UaY, UGA3, URE2, VPS28, VPS36, WHI3, YMR077c, YNL255c, YPR1, ZAP1, GanB, Gna3, FadA, Gna1, RfeH (PC23), RfeC (An09), lovU, Ste7, Nc1, Vps34, genes encoding bacterial protein toxins, and any fungal homologs of the aforementioned genes. Tables 5 and 6 include nucleic acid sequences for these genes as well as the predicted amino acid sequences of the proteins they encode. Homologs of these genes and proteins from other fungal species are also useful.

[0045] In certain embodiments of the methods according to this aspect of the invention, the modulation is expression of a dominant mutation of the gene. A “dominant mutation” is an allele of a gene that encodes a protein capable of changing the phenotype of an organism more than a non-mutated form of the gene. Dominant mutations include, without limitation, mutations that encode a protein capable of changing the phenotype of an organism even when a non-mutant form of this gene (or its homologs) is resident in the organism. Preferred dominant mutations include dominant negative mutations, dominant positive mutations, and dominant neomorphic mutations. A “dominant negative mutation” is a dominant mutation that achieves its phenotypic effect by interfering with some function of the gene or gene product from which it was derived, or from a homolog thereof. A “dominant positive mutation” is a dominant mutation that achieves its phenotypic effect by activating some function of the gene or gene product from which it was derived, or from a homolog thereof. A “dominant neomorphic mutation” is a dominant mutation that achieves the phenotypic effect of providing a novel function to the gene or gene product from which it was derived, or from a homolog thereof. Preferred dominant mutations according to this aspect of the invention include:

1. Mutations that result in increased or decreased stability of the transcript of a gene.

2. Mutations that result in increased or decreased stability of the product of translation:

[0046] For example, specific sequences near the amino terminus of a protein have been shown to cause increased or decreased protein stability. Similarly, sequences elsewhere in the protein, such as those required for ubiquitin-dependent degradation, can be mutated to increase the stability of a protein.

[0047] 3. Amino acid substitutions that mimic post-translational modifications: For example, phosphorylation has been demonstrated to positively or negatively regulate the activity of a variety of proteins, including transcription factors and kinases. Phosphorylation most commonly occurs on serine, threonine, and tyrosine residues; in some instances residues such as aspartate and histidine can be phosphorylated. Mutations that mimic constitutive dephosphorylation can be produced by mutating the coding sequence of the phosphorylated residue to the coding sequence of an amino acid that cannot be phosphorylated and does not have a negatively charged side chain (e.g. alanine). Alternatively, substitutions that result in changing serine, threonine, or tyrosine residues to charged amino acids such as glutamate or aspartate can result in an allele that mimics constitutive phosphorylation.

[0048] Proteolytic cleavage is another post-translational mechanism for regulating the activity of a protein. Mutations that result in truncation of a protein might mimic activation by proteolysis. Mutations that change amino acids required for proteolysis could activate proteins that are negatively regulated by proteolysis.

[0049] 4. Amino acid substitutions that promote or inhibit the binding of small molecules such as ATP, cAMP, GTP or GDP: For example, ATP is a co-factor for many enzymatic reactions, and the nucleotide-binding domains of these proteins are highly conserved. Lysine to arginine substitutions in the nucleotide-binding domain frequently result in inhibition of enzymatic activity. Enzymatically inactive proteins could be dominant negative molecules, acting by sequestering substrates from functional enzymes.

[0050] cAMP is required for the activation of protein kinase A. Protein kinase A consists of regulatory subunits and catalytic subunits. The binding of cAMP to the negative regulatory subunit relieves its inhibition of the catalytic subunit. Therefore, mutations that prevent cAMP binding could result in constitutive inactivation of protein kinase A.

[0051] G-proteins are a class of proteins that bind the nucleotides GTP and GDP. The GTP-bound form of these proteins is active, and hydrolysis of GTP to GDP results in the inactivation of the protein. Conserved substitutions can be made to lock G-proteins in either the GTP- or GDP-bound form, thus causing constitutive activation or inactivation.

[0052] 5. Mutations in portions of genes that encode regulatory domains of proteins: For example, many proteins, including kinases, contain regulatory domains that function as mechanisms to control the timing of activation. Mutations in these domains might result in constitutive activation of the kinase. Mutations that result in increased binding to regulatory proteins might result in constitutive inactivation.

[0053] Regulatory domains include short peptide sequences such as those required for nuclear import or export. Mutations in these sequences would result in constitutive cytoplasmic or nuclear localization, respectively, which could either activate or inhibit signaling.

[0054] 6. Mutations that result in proteins that are capable of binding to an appropriate signaling partner, but the complexes that form are inactive: For example, dimerization of proteins, either homodimers or heterodimers, often is required for signaling; in many instances, short protein sequences are sufficient to promote dimerization. Mutations in functional domains not required for dimerization might result in dominant inhibition; these proteins are capable of binding to and possibly sequestering other signaling molecules into inactive, or partially inactive, complexes.

[0055] 7. Mutations that decrease or increase the targeting of proteins to the appropriate subcellular destination: Short peptide sequences often facilitate the targeting of proteins to specific subcellular locations. For example, short sequences are sufficient to be recognized and modified by fatty acylation, prenylation, or glycosyl-phosphatidylinositol modification. These modifications result in targeting of proteins to membranes. Membrane spanning peptide sequences also have been identified, as have targeting sequences for secretion. In addition, sequences have been identified that target proteins to subcellular locations such as the endoplasmic reticulum, mitochondria, peroxisome, vacuole, nucleus, and lysosome. Mutations that inhibit proper targeting might result in dominant inhibition; these proteins might be capable of binding to and possibly sequestering other signaling molecules from the appropriate subcellular location.

[0056] Mutations that create a new protein function. For example, a mutation in a protein kinase could result in altered substrate specificity, such that the mutated kinase can modulate the activity of pathways that it does not usually regulate.

[0057] 8. In certain embodiments of the methods according to this aspect of the invention, the modulation is mediated by a peptide modulator of gene expression. The term “peptide” means a molecule comprised of a linear array of amino acid residues connected to each other in the linear array by peptide bonds. Such peptides according to the invention may include from about three to about 500 amino acids, and may further include secondary, tertiary or quaternary structures, as well as intermolecular associations with other peptides or other non-peptide molecules. Such intermolecular associations may be through, without limitation, covalent bonding (e.g., through disulfide linkages), chelation, electrostatic interactions, hydrophobic interactions, hydrogen bonding, ion-dipole interactions, dipole-dipole interactions, or any combination of the above. Peptides may be expressed in the cell or supplied exogenously. Preferably, they are provided on a scaffold to increase intracellular stability and to provide conformational constraint. A “scaffold” is a molecule, most frequently a small protein, from which a peptide is displayed; scaffolds are employed to optimize presentation, rigidity, conformational constraint, and potentially intracellular/extracellular localization. Preferred scaffolds include a catalytically inactive version of staphylococcal nuclease. Preferred peptides according to this aspect of the invention include, without limitation, those peptides disclosed in Norman et al., Science 285: 591-595 (1999).

[0058] In certain embodiments of the methods according to this aspect of the invention, the peptide modulator is an activator of gene expression. An “activator of gene expression” is a molecule that causes transcription and/or translation and/or gene product maturation to exceed by at least two-fold, preferably at least five fold, and more preferably at least ten-fold, the level of such expression that would be present under similar growth conditions in the absence of the activator of expression of the gene.

[0059] In certain embodiments of the methods according to this aspect of the invention, the peptide modulator is an inhibitor of gene expression. An “inhibitor of gene expression” is a molecule that causes transcription and/or translation and/or gene product maturation to be reduced by at least two-fold, preferably at least five fold, and more preferably at least ten-fold, the level of such expression that would be present under similar growth conditions in the absence of the inhibitor of expression of the gene.

[0060] In certain embodiments of the methods according to this aspect of the invention, the modulation is mediated by a small molecule modulator of gene expression. In certain embodiments of the methods according to this aspect of the invention, the small molecule modulator is an activator of gene expression. In certain embodiments of the methods according to this aspect of the invention, the small molecule (i.e., compound with a preferable molecular weight below 1000 daltons) modulator is an inhibitor of gene expression.

[0061] In certain embodiments of the methods according to this aspect of the invention, the modulation is conditional expression of the gene. “Conditional expression” of a gene means expression under certain growth conditions, but not under others. Such growth conditions that may be varied include, without limitation, carbon source, nitrogen source, phosphate source, pH, temperature, partial oxygen pressure, the presence or absence of small molecules such as drugs, and the presence or absence of a solid substrate.

[0062] In certain embodiments of the methods according to this aspect of the invention, the gene either encodes a transcription factor or the product that it encodes acts on a transcription factor. The term “the gene acts on” means that the gene or its transcriptional, translational, or post-translationally modified product affects the function of its target, preferably by increasing or decreasing transcription, increasing or decreasing translation, increasing or decreasing post-translational modification, increasing or decreasing protein stability, increasing or decreasing protein translocation, or increasing or decreasing protein function by interaction of the protein with another molecule. A “transcription factor” is a molecule that activates or inhibits transcription. The term “activates transcription” means to cause transcription to exceed by at least two-fold, preferably at least five-fold, and more preferably at least ten-fold, the level of transcription that would be present under similar growth conditions in the absence of the transcription factor. The term “inhibits transcription” means to cause transcription to be reduced by at least two-fold, preferably at least five-fold, and more preferably at least ten-fold, the level of such transcription that would be present under similar growth conditions in the absence of the transcription factor. Preferred transcription factors include, without limitation, transcription factors that modulate the expression of genes involved in the production or response to the small molecule cAMP (preferred examples include, without limitation, Mga1, Msn2, Msn4, Sfl1, and Sok2); transcription factors that function downstream of mitogen-activated protein (MAP) kinase signaling pathways that regulate the yeast invasion response (preferred examples include, without limitation, Mcm1, Ste12, and Tec1); transcription factors that modulate the expression of genes involved in nitrogen regulation (preferred examples include, without limitation, AreA, Gln3, Hms1, Hms2, NreB, TamA, and Uga3); transcription factors that modulate the expression of genes involved in pH regulation in fungi (preferred examples include, without limitation PacC and Rim101); general transcription factors (preferred examples include, without limitation, Sin3, Snf2, Srb8, Srb9, Srb10, Srb11, Ssn6, and Tup1); transcription factors that modulate the expression of genes involved in carbon metabolism (preferred examples include, without limitation, Adr1, Cat8, CreA, FacB, Gcr1, Gcr2, Hap4, Mig1, Mig2, Mth1, Nrg1, Oaf1, and Sip4); heme-dependent transcription factors (preferred examples include, without limitation, Hap1 and Rox1); transcription factors that modulate the expression of genes involved in the uptake of metals (preferred examples include, without limitation, Aft1, Cup9, Mac1, SreP, SreA, and Zap 1); transcription factors that modulate the expression of genes involved in cell-cycle regulation (preferred examples include, without limitation, Skn7, Swi4, and Swi6); transcription factors that modulate the expression of genes involved in invasion (preferred examples include, without limitation, Ash1, Flo8, Gts1, Inv7, Msn1, Mss11, Phd1, and Rre1); transcription factors that modulate the expression of genes involved in amino acid biosynthesis or transport (preferred examples include, without limitation, Gcn4, Leu3, Lys14, Met4, Met28, Met31, MetR, Put3, SconB, and Uga3); transcription factors that modulate the expression of genes involved in phosphate metabolism or transport (preferred examples include, without limitation, Pho2 and Pho4); transcription factors that modulate the expression of genes involved in nucleotide metabolism or transport (preferred examples include, without limitation, Ppr1 and UaY); transcription factors that modulate the expression of genes involved in cell wall processes (preferred examples include, without limitation, Ace2, Swi4, and Swi6); transcription factors that modulate the expression of genes involved in sporulation (preferred examples include, without limitation, Ime1 and Ime4); transcription factors that modulate the expression of genes involved in phospholipid synthesis (preferred examples include, without limitation, Ino2); transcription factors that modulate the expression of genes involved in aflatoxin biosynthesis (preferred examples include, without limitation, AflR); transcription factors that modulate the expression of genes involved in lovastatin biosynthesis (preferred examples include, without limitation, AAD34561 and LovE); and transcription factors that modulate the expression of genes involved in filamentous fungal development (preferred examples include, without limitation, AbaA). The term “general transcription factors” means components involved in the formation of preinitiation complexes at promoters that are regulated by RNA polymerase II. The term “invasion” means a process by which a fungus penetrates, digs, adheres to, or attaches to a substrate.

[0063] In certain embodiments of the methods according to this aspect of the invention, the gene either encodes a transmembrane transporter or the product that it encodes acts on a transmembrane transporter. A “transmembrane transporter” is a molecule or complex of molecules that facilitates passage of another type of molecule from one side of a cellular membrane to the other side in an energy-dependent or energy-independent manner. “Facilitates passage” means that the number of molecules traversing the membrane is greater than it would have been in the absence of the transmembrane transporter, preferably at least two-fold greater, more preferably at least ten-fold greater, even more preferably at least one hundred-fold greater, and most preferably at least one thousand-fold greater. Preferred classes of transmembrane transporters include, without limitation, proteins of the ATP-binding cassette superfamily, members of the Major Facilitator Superfamily (MFS) that include, without limitation Pump1 and Pump2, P-type ATPases, members of the mitochondrial carrier family (MCF) that include, without limitation, Pet9 and AAD34562, ion channels, permeases that include, without limitation, Bap2, Hip 1, Mep1, and Mep2; and components that transport sugars, ions, or metals.

[0064] In certain embodiments of the methods according to this aspect of the invention, the gene either encodes a kinase or the product that it encodes acts on a kinase. A “kinase” is a molecule that phosphorylates a protein, a lipid, a nucleic acid, a carbohydrate, or any other substrate that is capable of being phosphorylated. Preferred kinases include, without limitation, Cdc28, Elm1, Fus3, Gcn2, Hog1, Hsl1, Hxk2, Kss1, Pbs2, Pho85, Rim15, Ste7, Sch9, Snf1, Ste11, Ste20, Tpk1, Tpk2, and Tpk3.

[0065] In certain embodiments of the methods according to this aspect of the invention, the gene either encodes a “G-protein” (i.e., guanyl-nucleotide binding protein or the product that it encodes acts on a G-protein. Preferred G-proteins include, without limitation Cdc42, FadA, Gpa1, Gpa2, Ras1, and Ras2.

[0066] In certain embodiments of the methods according to this aspect of the invention, the gene either encodes a cell surface receptor or the product that it encodes acts on a cell surface receptor. A “cell surface receptor” is a molecule that resides at the plasma membrane, binds an extracellular signaling molecule, and transduces this signal to propagate a cellular response. Preferred cell surface receptors include, without limitation, G-protein coupled receptors. Preferred G-protein coupled receptors include, without limitation, Gpr1.

[0067] In certain embodiments of the methods according to this aspect of the invention, the gene either encodes a GTPase activating protein or the product that it encodes acts on a GTPase activating protein. A “GTPase activating protein” is a molecule that promotes the hydrolysis of GTP bound to a G-protein. GTP-activating proteins often negatively regulate the activity of G-proteins. Preferred GTPase activating proteins include, without limitation, RGS family members. “RGS family members” are regulators of G-protein signaling that act upon G-protein coupled receptors. Preferred RGS family members include, without limitation, FlbA, Rgs2, and Sst2.

[0068] In certain embodiments of the methods according to this aspect of the invention, the gene either encodes a guanine nucleotide exchange factor or the product that it encodes acts on a guanine nucleotide exchange factor. A “guanine nucleotide exchange factor” is a molecule that catalyzes the dissociation of GDP from the inactive GTP-binding proteins; following dissociation, GTP can then bind and induce structural changes that activate G-protein signaling. Preferred guanine nucleotide exchange factors include, without limitation, Cdc24 and Cdc25.

[0069] In certain embodiments of the methods according to this aspect of the invention, the gene either encodes a phosphatase or the product that it encodes acts on a phosphatase. A “phosphatase” is a molecule that dephosphorylates a protein, a lipid, a nucleic acid, a carbohydrate, or any other substrate that is capable of being dephosphorylated. Preferred phosphatases include, without limitation, Cdc55 and Ptc1.

[0070] In certain embodiments of the methods according to this aspect of the invention, the gene either encodes a protease or the product that it encodes acts on a protease. A “protease” is a molecule that cleaves one or more amide bonds in a peptide or protein. “Preferred proteases include, without limitation, Rim13 and LF.

[0071] In certain embodiments of the methods according to this aspect of the invention, the gene either encodes a cyclic nucleotide phosphodiesterase or the product that it encodes acts on a cyclic nucleotide phosphodiesterase. A “cyclic nucleotide phosphodiesterase” is a molecule that catalyzes the hydrolysis of the 3′ phosphate bond of a 3′, 5′ cyclic nucleotide to yield free 5′ nucleotide. Preferred examples of cyclic nucleotide phosphodiesterases include, without limitation, Pde2.

[0072] In certain embodiments of the methods according to this aspect of the invention, the gene either encodes a bacterial protein toxin or the product that it encodes acts on a bacterial protein toxin. A “bacterial protein toxin” is protein produced by a bacterium, as part of the pathogenesis of the bacterial organism, to kill or impair the biological function of the host organism. Bacterial protein toxins exhibit a wide-variety of biochemical and enzymatic activities including those of adenylate cyclases, ADP-ribosyltransferases, phospholipases, and proteases. Expression of bacterial protein toxins in fungi could result in increased production of secondary metabolites. Preferred bacterial protein toxins include, without limitation, Anthrax toxin edema factor (EF; Bacillus anthracis), Anthrax toxin lethal factor (LF; Bacillus anthracis), adenylate cyclase toxin (Bordetella pertussis), Cholera enterotoxin (Vibrio cholerae), LT toxin (Escherichia coli), ST toxin (E. coli), Shiga toxin (Shigella dysenteriae), Perfringens enterotoxin (Clostridium perfringens), Botulinum toxin (Clostridium botulinum), Tetanus toxin (Clostridium tetani), Diphtheria toxin (Corynebacterium diphtheriae), Exotoxin A (Pseudomonas aeruginosa), Exoenzyme S (P. aeruginosa), Pertussis toxin (Bordetella pertussis), alpha and epsilon toxins (C. perfringens), lethal toxin (LT; Clostridium sordellii), toxins A and B (Clostridium dificile), and phospholipase C (Clostridium bifermentans).

[0073] In certain embodiments of the methods according to this aspect of the invention, the gene either encodes an importin protein or the product that it encodes acts on an importin protein. An “importin” protein is a molecule that functions in the translocation of proteins from the nucleus to the cytosol or from the cytosol to the nucleus. Preferred examples of importin proteins include, without limitation, Msn5.

[0074] In certain embodiments of the methods according to this aspect of the invention, the gene either encodes a RNA-binding protein or the product that it encodes acts on a RNA-binding protein. Preferred examples of RNA-binding proteins include, without limitation, Dhh1 and Whi3.

[0075] In certain embodiments of the methods according to this aspect of the invention, the gene either encodes a component of a SCF complex or the product that it encodes acts on a component of a SCF complex. A “component of a SCF complex” is a molecule in a multi-protein aggregate that targets various substrates involved in the G1 to S phase cell cycle transition for ubiquitin-dependent degradation. Preferred examples of components of a SCF complex include, without limitation, Grr1.

[0076] In certain embodiments of the methods according to this aspect of the invention, the gene either encodes or the gene product acts on a biosynthetic enzyme. In certain embodiments of the methods according to this aspect of the invention, the gene acts on biosynthetic enzyme for the secondary metabolite to be produced. RIM9, ROX1, RRE1, SCH9, sconB, SFL1, SHO1, SHR3, SIN3, SIP4, SKN7, SNF1, SNF2, SNF7, SNF8, SOK2, SRB10, SRB11, SRB8, SRB9, sreA, sreP, SRV2, SSD1, SSN6, SST2, STE11, STE12, STE20, STE50, STE7, STP22, SWI4, SWI6, tamA, TEC1, TPK1, TPK2, TPK3, TUP1, UaY, UGA3, URE2, VPS28, VPS36, WHI3, YMR077c, YNL255c, YPR1, ZAP1, genes encoding bacterial protein toxins, and any fungal homologs of the aforementioned genes.

[0077] In certain embodiments of the methods according to this aspect of the invention, the methods further comprise purifying the secondary metabolite from a culture of the fungus.

[0078] Improving Production of a Secondary Metabolite in a Fungus by Altering the Characteristics of the Fungus in a Manner that is Beneficial to the Production of the Secondary Metabolite

[0079] In a fifth aspect, the invention provides methods for improving production of a secondary metabolite in a fungus by altering the characteristics of the fungus in a manner that is beneficial to the production of the secondary metabolite, the method comprising modulating the expression of a gene involved in regulation of secondary metabolite production in a manner that alters the characteristics of the fungus. “Altering the characteristics” means changing the morphology or growth traits of the fungus. Preferred alterations include, without limitation, those alterations that result in transition of the fungus from the hyphal to yeast form, those alterations that result in transition of the fungus from the yeast to hyphal form, alterations that lead to more or less hyphal branching, alterations that increase or decrease flocculence, adherence, cell buoyancy, surface area of the fungus, cell wall integrity and/or stability, pellet size, ability to grow at higher or lower temperatures, and alterations that increase the saturating growth density of a culture or rate of pellet formation.

[0080] In certain embodiments of the methods according to this aspect of the invention, the modulation is overexpression of the gene. Preferred genes according to this aspect of the invention include, without limitation, AAD34561, abaA, ACE2, ADR1, AFL1, aflR, AFT1, AGA1, AGA2, amyR, area, ASH1, BAP2, BCY1, BEM1, BEM2, BEM3, BNI1, BUD2, BUD5, CAT8, CDC24, CDC25, CDC28, CDC42, CDC55, CLB2, creA, CTS1, CUP9, CYR1, DFG16, DHH1, DPH3, ELM1, facB, FLO1, FLO10, FLO11, FLO5, FLO8, FLO9, FUS3, GCN2, GCN4, GCR1, GCR2, GIC1, GIC2, GLN3, GPA1, GPA2, GPR1, GRR1, GTS1, HAP1, HAP4, HIP1, HMS1, HMS2, HOG1, HSL1, HXK2, IME1, IME4, INO2, INV11,

[0081] In certain embodiments of the methods according to this aspect of the invention, the gene is not AFL1, BEM2, CDC25, DHH1, HOG1, INV11, INV13, INV5, INV7, INV9, IRA1, MCM1, MEP2, MGA1, MSN1, MSN5, MSS1, PET9, PHO23, PTC1, RIM101, RIM13, RIM15, RIM9, SFL1, SNF8, SRB11, SSD1, STP22, SWI4, TPK2, TPK3, VPS28, VPS36, or YPR1. Each of these genes is as described in PCT Publication No. WO99/25865A1

[0082] In certain embodiments of the methods according to this aspect of the invention, the gene is selected from the group consisting of AAD34561, AAD34562, abaA, ACE2, ADR1, AFL1, aflR, AFT1, amyR, areA, ASH1, BAP2, BCY1, CAT8, CDC24, CDC25, CDC28, CDC42, CDC55, CLB2, creA, CTS1, CUP9, CYR1, DFG16, DHH1, DPH3, ELM1, facB, FLO1, FLO11, FLO8, FUS3, GCN2, GCN4, GCR1, GCR2, GLN3, GPA1, GPA2, GPR1, GRR1, GTS1, HAP1, HAP4, HIP1, HMS1, HMS2, HOG1, HSL1, HXK2, IME1, IME4, INO2, INV11, INV13, INV16, INV5, INV7, INV9, KSS1, LEU3, lovE, LYS14, MAC1, MCM1, MEP1, MEP2, MET28, MET31, MET4, metR, MGA1, MIG1, MIG2, MSN1, MSN2, MSN4, MSN5, MSS11, MTH1, NPR1, nreB, NRG1, OAF1, pacC, PBS2, PDE2, PET9, PHD1, PHO2, PHO4, PHO85, pkaR, PPR1, PTC1, PUT3, RAS1, RAS2, RGS2, RIM101, RIM13, RIM15, RIM9, ROX1, RRE1, SCH9, sconB, SFL1, SHO1, SHR3, SIN3, SIP4, SKN7, SNF1, SNF2, SNF7, SNF8, SOK2, SRB10, SRB11, SRB8, SRB9, sreA, sreP, SRV2, SSD1, SSN6, SST2, STE11, STE12, STE20, STE50, STE7, STP22, SWI4, SWI6, tamA, TEC1, TPK1, TPK2, TPK3, TUP1, UaY, UGA3, URE2, VPS28, VPS36, WHI3, YMR077c, YNL255c, YPR1, ZAP1, GanB, Gna3, FadA, Gna1, RfeH (PC23), RfeC (An09), lovU, Ste7, Nc1, Vps34, genes encoding bacterial protein toxins, and any fungal homologs of the aforementioned genes. Tables 5 and 6 include nucleic acid sequences for these genes as well as the predicted amino acid sequences of the proteins they encode. Homologs of these genes and proteins from other fungal species are also useful.

[0083] A “fungal homolog” of a gene is a gene encoding a gene product that is capable of performing at least a portion of the function of the product encoded by the reference gene, and is substantially identical to the reference gene and/or the encoded product. “Substantially identical” means a polypeptide or nucleic acid exhibiting at least 25%, preferably 50%, more preferably 80%, and most preferably 90%, or even 95% identity to a reference amino acid sequence or nucleic acid sequence. For polypeptides, the length of comparison sequences will generally be at least 16 amino acids, preferably at least 20 amino acids, more preferably at least 25 amino acids, and most preferably 35 amino acids or greater. For nucleic acids, the length of comparison sequences will generally be at least 50 nucleotides, preferably at least 60 nucleotides, more preferably at least 75 nucleotides, and most preferably 110 nucleotides or greater.

[0084] Sequence identity is typically measured using sequence analysis software (for example, Sequence Analysis Software Package of the Genetics Computer Group, University of Wisconsin Biotechnology Center, 1710 University Avenue, Madison Wis. 53705, BLAST, BEAUTY, or PILEUP/PRETTYBOX programs). Most preferably, BLAST is used. Such software matches identical or similar sequences by assigning degrees of homology to various substitutions, deletions, and/or other modifications. Conservative substitutions typically include substitutions within the following group: glycine, alanine, valine, isoleucine, leucine; aspartic acid, glutamic acid, asparagine, glutamine; serine, threonine; lysine, arginine; and phenylalanine, tyrosine.

[0085] In certain embodiments of the methods according to this aspect of the invention, the methods further comprise purifying the secondary metabolite from a culture of the fungus. “Purifying” means obtaining the secondary metabolite in substantially pure form. “Substantially pure” means comprising at least 90%, more preferably at least 95%, and most preferably at least 99%, of the purified composition on a weight basis.

[0086] Improving Production of a Secondary Metabolite by Increasing Productivity of the Secondary Metabolite in the Fungus

[0087] In a second aspect, the invention provides methods for improving production of a secondary metabolite by a fungus by increasing productivity of the secondary metabolite in the fungus, the methods comprising modulating the expression of a gene involved in regulation of secondary metabolite production in a manner that improves the productivity of the secondary metabolite. “Increasing productivity” means to increase the quotient for the equation: concentration of secondary metabolite divided by the product of time of fermentor run, fermentation volume, and grams of dry cell weight of biomass (Productivity=concentration metabolite/(time*volume*gDCW)). Significant advantages that might result from increasing productivity include, without limitation, a decrease in fermentor run time, a decrease in the size of fermentor required for production of equivalent amounts of secondary metabolite, or a decrease in the biomass required for production. Collectively, improvements examples include, without limitation, Mcm1, Ste12, and Tec1); transcription factors that modulate the expression of genes involved in nitrogen regulation (preferred examples include, without limitation, AreA, Gln3, Hms1, Hms2, NreB, TamA, and Uga3); transcription factors that modulate the expression of genes involved in pH regulation in fungi (preferred examples include, without limitation PacC and Rim101); general transcription factors (preferred examples include, without limitation, Sin3, Snf2, Srb8, Srb9, Srb10, Srb11, Ssn6, and Tup1); transcription factors that modulate the expression of genes involved in carbon metabolism (preferred examples include, without limitation, Adr1, Cat8, CreA, FacB, Gcr1, Gcr2, Hap4, Mig1, Mig2, Mth1, Nrg1, Oaf1, and Sip4); heme-dependent transcription factors (preferred examples include, without limitation, Hap1 and Rox1); transcription factors that modulate the expression of genes involved in the uptake of metals (preferred examples include, without limitation, Aft1, Cup9, Mac1, SreP, SreA, and Zap1); transcription factors that modulate the expression of genes involved in cell-cycle regulation (preferred examples include, without limitation, Skn7, Swi4, and Swi6); transcription factors that modulate the expression of genes involved in invasion (preferred examples include, without limitation, Ash1, Flo8, Gts1, Inv7, Msn1, Mss11, Phd1, and Rre1); transcription factors that modulate the expression of genes involved in amino acid biosynthesis or transport (preferred examples include, without limitation, Gcn4, Leu3, Lys14, Met4, Met28, Met31, MetR, Put3, SconB, and Uga3); transcription factors that modulate the expression of genes involved in phosphate metabolism or transport (preferred examples include, without limitation, Pho2 and Pho4); transcription factors that modulate the expression of genes involved in nucleotide metabolism or transport (preferred examples include, without limitation, Ppr1 and UaY); transcription factors that modulate the expression of genes involved in cell wall processes (preferred examples include, without limitation, Ace2, Swi4, and Swi6); transcription factors that modulate the expression of genes involved in sporulation (preferred examples include, without limitation, Ime1 and Ime4); transcription factors that modulate the expression of genes involved in phospholipid synthesis (preferred examples include, without limitation, Ino2); transcription factors that modulate the expression of genes involved in aflatoxin biosynthesis (preferred examples include, without limitation, AflR); transcription factors that modulate the expression of genes involved in lovastatin biosynthesis (preferred examples include, without limitation, AAD34561 and LovE); and transcription in productivity can reduce both fixed costs (capital equipment expenses such as fermentor and production facility size, for example) and variable costs (including, but not limited to, decreased waste stream during downstream processing, decreased energy and labor costs, and decreased cost of bulk ingredients). Preferably, such increased productivity is by at least ten percent, more preferably at least 50 percent, and most preferably at least two-fold.

[0088] Preferably, for this aspect of the invention, when the secondary metabolite is isopenicillin N, then the modulation is not mediated by the transcription factor CPCR1; when the secondary metabolite is sterigmatocystin, then the modulation is not through AflR, FadA, or FluG; when the secondary metabolite is aflatoxin, then the modulation is not through AflR; when the secondary metabolite is penicillin and the fungus is Aspergillus, then the modulation is not through mutations that result in expression of truncated forms of PacC or constitutively active forms of FadA; when the gene involved in regulation of secondary metabolite production is from Saccharomyces cerevisiae, then the modulation is not through decreased activity or expression of Bem2, Hog1, Ira1, Rim15, Sfl1, Srb11, Ssd1, Swi4, Tpk3 or though increased activity or expression of Afl1, Cdc25, Dhh1, Hap4, Inv11, Inv13, Inv5, Inv7, Inv9, Mcm1, Mep2, Mga1, Msn1, Msn5, Mss11, Pet9, Pho23, Ptc1, Rim101, Rim13, Rim9, Snf8, Stp22, Tpk2, Vps28, Vps36, or Ypr1.

[0089] In certain embodiments of the methods according to this aspect of the invention, the modulation is overexpression of the gene. Preferred genes according to this aspect of the invention include, without limitation, AAD34561, AAD34562, abaA, ACE2, ADR1, AFL1, aflR, AFT1, amyR, areA, ASH1, BAP2, BCY1, CAT8, CDC24, CDC25, CDC28, CDC42, CDC55, CLB2, creA, CTS1, CUP9, CYR1, DFG16, DHH1, DPH3, ELM1, facB, FLO1, FLO11, FLO8, FUS3, GCN2, GCN4, GCR1, GCR2, GLN3, GPA1, GPA2, GPR1, GRR1, GTS1, HAP1, HAP4, HIP1, HMS1, HMS2, HOG1, HSL1, HXK2, IME1, IME4, INO2, INV11, INV13, INV16, INV5, INV7, INV9, KSS1, LEU3, lovE, LYS14, MAC1, MCM1, MEP1, MEP2, MET28, MET31, MET4, metR, MGA1, MIG1, MIG2, MSN1, MSN2, MSN4, MSN5, MSS11, MTH1, NPR1, nreB, NRG1, OAF1, pacC, PBS2, PDE2, PET9, PHD1, PHO2, PHO4, PHO85, pkaR, PPR1, PTC1, PUT3, RAS1, RAS2, RGS2, RIM101, RIM13, RIM15, RIM9, ROX1, RRE1, SCH9, sconB, SFL1, SHO1, SHR3, SIN3, SIP4, SKN7, SNF1, SNF2, SNF7, SNF8, SOK2, SRB10, SRB11, SRB8, SRB9, sreA, sreP, SRV2, SSD1, SSN6, SST2, STE11, STE12, STE20, STE50, STE7, STP22, SWI4, SWI6, tamA, TEC1, TPK1, TPK2, factors that modulate the expression of genes involved in filamentous fungal development (preferred examples include, without limitation, AbaA).

[0090] In certain embodiments of the methods according to this aspect of the invention, the gene either encodes a transmembrane transporter or the product that it encodes acts on a transmembrane transporter. Preferred classes of transmembrane transporters include, without limitation, proteins of the ATP-binding cassette superfamily, members of the Major Facilitator Superfamily (MFS) that include, without limitation Pump1 and Pump2, P-type ATPases, members of the mitochondrial carrier family (MCF) that include, without limitation, Pet9 and AAD34562, ion channels, permeases that include, without limitation, Bap2, Hip 1, Mep1, and Mep2; and components that transport sugars, ions, or metals.

[0091] In certain embodiments of the methods according to this aspect of the invention, the gene either encodes a kinase or the product that it encodes acts on a kinase. Preferred kinases include, without limitation, Cdc28, Elm1, Fus3, Gcn2, Hog1, Hsl1, Hxk2, Kss1, Pbs2, Pho85, Rim15, Ste7, Sch9, Snf1, Ste11, Ste20, Tpk1, Tpk2, and Tpk3.

[0092] In certain embodiments of the methods according to this aspect of the invention, the gene either encodes a G-protein or the product that it encodes acts on a G-protein. Preferred G-proteins include, without limitation Cdc42, FadA, Gpa1, Gpa2, Ras1, and Ras2.

[0093] In certain embodiments of the methods according to this aspect of the invention, the gene either encodes a cell surface receptor or the product that it encodes acts on a cell surface receptor. Preferred cell surface receptors include, without limitation, G-protein coupled receptors. Preferred G-protein coupled receptors include, without limitation, Gpr1.

[0094] In certain embodiments of the methods according to this aspect of the invention, the gene either encodes a GTPase activating protein or the product that it encodes acts on a GTPase activating protein. Preferred GTPase activating proteins include, without limitation, RGS family members. “RGS family members” are regulators of G-protein signaling that act upon G-protein coupled receptors. Preferred RGS family members include, without limitation, FlbA, Rgs2, and Sst2.

[0095] In certain embodiments of the methods according to this aspect of the invention, the gene either encodes a guanine nucleotide exchange factor or the product that it encodes acts on a guanine nucleotide exchange factor. Preferred guanine nucleotide exchange factors include, without limitation, Cdc24 and Cdc25. TPK3, TUP1, UaY, UGA3, URE2, VPS28, VPS36, WHI3, YMR077c, YNL255c, YPR1, ZAP1, GanB, Gna3, FadA, Gna1, RfeH (PC23), RfeC (An09), lovU, Ste7, Nc1, Vps34, genes encoding bacterial protein toxins, and any fungal homologs of the aforementioned genes. Tables 5 and 6 include nucleic acid sequences for these genes as well as the predicted amino acid sequences of the proteins they encode. Homologs of these genes and proteins from other fungal species are also useful.

[0096] In certain embodiments of the methods according to this aspect of the invention, the modulation is expression of a dominant mutation of the gene.

[0097] In certain embodiments of the methods according to this aspect of the invention, the modulation is mediated by a peptide modulator of gene expression. Peptides may be expressed in the cell or supplied exogenously. Preferably, they are provided on a scaffold to increase intracellular stability and to provide conformational constraint.

[0098] In certain embodiments of the methods according to this aspect of the invention, the peptide modulator is an activator of gene expression.

[0099] In certain embodiments of the methods according to this aspect of the invention, the peptide modulator is an inhibitor of gene expression.

[0100] In certain embodiments of the methods according to this aspect of the invention, the modulation is mediated by a small molecule modulator of gene expression. In certain embodiments of the methods according to this aspect of the invention, the small molecule modulator is an activator of gene expression. In certain embodiments of the methods according to this aspect of the invention, the small molecule modulator is an inhibitor of gene expression.

[0101] In certain embodiments of the methods according to this aspect of the invention, the modulation is conditional expression of the gene.

[0102] In certain embodiments of the methods according to this aspect of the invention, the gene either encodes a transcription factor or the product that it encodes acts on a transcription factor. Preferred transcription factors include, without limitation, transcription factors that modulate the expression of genes involved in the production or response to the small molecule cAMP (preferred examples include, without limitation, Mga1, Msn2, Msn4, Sfl1, and Sok2); transcription factors that function downstream of mitogen-activated protein (MAP) kinase signaling pathways that regulate the yeast invasion response (preferred

[0103] In certain embodiments of the methods according to this aspect of the invention, the gene either encodes a phosphatase or the product that it encodes acts on a phosphatase. Preferred phosphatases include, without limitation, Cdc55 and Ptc1.

[0104] In certain embodiments of the methods according to this aspect of the invention, the gene either encodes a protease or the product that it encodes acts on a protease. Preferred proteases include, without limitation, Rim13 and LF.

[0105] In certain embodiments of the methods according to this aspect of the invention, the gene either encodes a cyclic nucleotide phosphodiesterase or the product that it encodes acts on a cyclic nucleotide phosphodiesterase. Preferred examples of cyclic nucleotide phosphodiesterases include, without limitation, Pde2.

[0106] In certain embodiments of the methods according to this aspect of the invention, the gene either encodes a bacterial protein toxin or the product that it encodes acts on a bacterial protein toxin. Preferred bacterial protein toxins include, without limitation, Anthrax toxin edema factor (EF; Bacillus anthracis), Anthrax toxin lethal factor (LF; Bacillus anthracis), adenylate cyclase toxin (Bordetella pertussis), Cholera enterotoxin (Vibrio cholerae), LT toxin (Escherichia coli), ST toxin (E. coli), Shiga toxin (Shigella dysenteriae), Perfringens enterotoxin (Clostridium perfringens), Botulinum toxin (Clostridium botulinum), Tetanus toxin (Clostridium tetani), Diphtheria toxin (Corynebacterium diphtheriae), Exotoxin A (Pseudomonas aeruginosa), Exoenzyme S (P. aeruginosa), Pertussis toxin (Bordetella pertussis), alpha and epsilon toxins (C. perfringens), lethal toxin (LT; Clostridium sordellii), toxins A and B (Clostridium dificile), and phospholipase C (Clostridium bifermentans).

[0107] In certain embodiments of the methods according to this aspect of the invention, the gene either encodes an importin protein or the product that it encodes acts on an importin protein. Preferred examples of importin proteins include, without limitation, Msn5.

[0108] In certain embodiments of the methods according to this aspect of the invention, the gene either encodes a RNA-binding protein or the product that it encodes acts on a RNA-binding protein. Preferred examples of RNA-binding proteins include, without limitation, Dhh1 and Whi3.

[0109] In certain embodiments of the methods according to this aspect of the invention, the gene either encodes a component of a SCF complex or the product that it encodes acts on a component of a SCF complex. Preferred examples of components of a SCF complex include, without limitation, Grr1.

[0110] In certain embodiments of the methods according to this aspect of the invention, the gene either encodes or the gene product acts on a biosynthetic enzyme. In certain embodiments of the methods according to this aspect of the invention, the gene acts on biosynthetic enzyme for the secondary metabolite to be produced.

[0111] In certain embodiments of the methods according to this aspect of the invention, the gene is selected from the group consisting of AAD34561, AAD34562, abaA, ACE2, ADR1, AFL1, aflR, AFT1, amyR, areA, ASH1, BAP2, BCY1, CAT8, CDC24, CDC25, CDC28, CDC42, CDC55, CLB2, creA, CTS1, CUP9, CYR1, DFG16, DHH1, DPH3, ELM1, facB, FLO1, FLO11, FLO8, FUS3, GCN2, GCN4, GCR1, GCR2, GLN3, GPA1, GPA2, GPR1, GRR1, GTS1, HAP1, HAP4, HIP1, HMS1, HMS2, HOG1, HSL1, HXK2, IME1, IME4, INO2, INV11, INV13, INV16, INV5, INV7, INV9, KSS1, LEU3, lovE, LYS14, MAC1, MCM1, MEP1, MEP2, MET28, MET31, MET4, metR, MGA1, MIG1, MIG2, MSN1, MSN2, MSN4, MSN5, MSS11, MTH1, NPR1, nreB, NRG1, OAF1, pacC, PBS2, PDE2, PET9, PHD1, PHO2, PHO4, PHO85, pkaR, PPR1, PTC1, PUT3, RAS1, RAS2, RGS2, RIM101, RIM13, RIM15, RIM9, ROX1, RRE1, SCH9, SFL1, SHO1, SHR3, SIN3, SIP4, SKN7, SNF1, SNF2, SNF7, SNF8, sconB, SOK2, SRB10, SRB11, SRB8, SRB9, sreA, sreP, SRV2, SSD1, SSN6, SST2, STE11, STE12, STE20, STE50, STE7, STP22, SWI4, SWI6, tamA, TEC1, TPK1, TPK2, TPK3, TUP1, UaY, UGA3, URE2, VPS28, VPS36, WHI3, YMR077c, YNL255c, YPR1, ZAP1, GanB, Gna3, FadA, Gna1, RfeH (PC23), RfeC (An09), lovU, Ste7, Nc1, Vps34, genes encoding bacterial protein toxins, and any fungal homologs of the aforementioned genes. Tables 5 and 6 include nucleic acid sequences for these genes as well as the predicted amino acid sequences of the proteins they encode. Homologs of these genes and proteins from other fungal species are also useful.

[0112] In certain embodiments of the methods according to this aspect of the invention, the methods further comprise purifying the secondary metabolite from a culture of the fungus.

[0113] Increasing Secondary Metabolite Production by Increasing Efflux or Excretion of the

[0114] metabolite

[0115] In a third aspect, the invention provides methods for improving production of a secondary metabolite in a fungus by increasing efflux or excretion of the secondary metabolite, the method comprising modulating the expression of a gene involved in regulation of secondary metabolite production in a manner that increases efflux or excretion of the secondary metabolite. “Increasing efflux or excretion of the secondary metabolite” means that a greater quantity of the secondary metabolite passes from the inside of the fungal cells to the outside of the fungal cell per unit time in the absence of lysis of the fungal cells. “Outside of the fungal cell” is defined as being no longer contained wholly within the lipid bilayer of the cell and/or extractable from the cell with methods that do not release a majority of intracellular contents. Increasing efflux of a metabolite could have beneficial impacts on the economics of a fermentation that include, but are not limited to, increasing the amount of metabolite available for isolation in the absence of cell lysis (thus reducing downstream processing costs) and elimination of negative autoregulation by the metabolite to allow increased synthesis.

[0116] In certain embodiments of the methods according to this aspect of the invention, the modulation is overexpression of the gene. Preferred genes according to this aspect of the invention include, without limitation, AAD34558, AAD34561, AAD34564, ATR1, ERG6, FCR1, GCN4, lovE, MDR1, PDR1, PDR3, PDR5, PDR10, PDR13, SNQ2, TRI12, and YAP1.

[0117] In certain embodiments of the methods according to this aspect of the invention, the modulation is expression of a dominant mutation of the gene.

[0118] In certain embodiments of the methods according to this aspect of the invention, the modulation is mediated by a peptide modulator of gene expression. Peptides may be expressed in the cell or supplied exogenously. Preferably, they are provided on a scaffold to increase intracellular stability and to provide conformational constraint. Preferred peptides according to this aspect of the invention include those discussed earlier.

[0119] In certain embodiments of the methods according to this aspect of the invention, the peptide modulator is an activator of gene expression.

[0120] In certain embodiments of the methods according to this aspect of the invention, the peptide modulator is an inhibitor of gene expression.

[0121] In certain embodiments of the methods according to this aspect of the invention, the modulation is mediated by a small molecule modulator of gene expression. In certain embodiments of the methods according to this aspect of the invention, the small molecule modulator is an activator of gene expression. In certain embodiments of the methods according to this aspect of the invention, the small molecule modulator is an inhibitor of gene expression.

[0122] In certain embodiments of the methods according to this aspect of the invention, the modulation is conditional expression of the gene. In certain embodiments of the methods according to this aspect of the invention, the gene either encodes a transcription factor or the product that it encodes acts on a transcription factor. Preferred transcription factors include, without limitation, AAD34561, Fcr1, Gcn4, LovE, Pdr1, Pdr3, and Yap1.

[0123] In certain embodiments of the methods according to this aspect of the invention, the gene either encodes a transmembrane transporter or the product that it encodes acts on a transmembrane transporter. Preferred transmembrane transporters include, without limitation, AAD34558, AAD34564, Atr1, Mdr1, Pdr5, Pdr10, Snq2, and Tri12.

[0124] In certain embodiments of the methods according to this aspect of the invention, the gene either encodes a kinase or the product that it encodes acts on a kinase.

[0125] In certain embodiments of the methods according to this aspect of the invention, the gene either encodes a G-protein or the product that it encodes acts on a G-protein.

[0126] In certain embodiments of the methods according to this aspect of the invention, the gene either encodes a cell surface receptor or the product that it encodes acts on a cell surface receptor.

[0127] In certain embodiments of the methods according to this aspect of the invention, the gene either encodes a GTPase activating protein or the product that it encodes acts on a GTPase activating protein.

[0128] In certain embodiments of the methods according to this aspect of the invention, the gene either encodes a guanine nucleotide exchange factor or the product that it encodes acts on a guanine nucleotide exchange factor.

[0129] In certain embodiments of the methods according to this aspect of the invention, the gene either encodes a phosphatase or the product that it encodes acts on a phosphatase.

[0130] In certain embodiments of the methods according to this aspect of the invention, the gene either encodes a protease or the product that it encodes acts on a protease.

[0131] In certain embodiments of the methods according to this aspect of the invention, the gene either encodes a cyclic nucleotide phosphodiesterase or the product that it encodes acts on a cyclic nucleotide phosphodiesterase.

[0132] In certain embodiments of the methods according to this aspect of the invention, the gene either encodes a bacterial protein toxin or the product that it encodes acts on a bacterial protein toxin.

[0133] In certain embodiments of the methods according to this aspect of the invention, the gene either encodes an importin protein or the product that it encodes acts on an importin protein.

[0134] In certain embodiments of the methods according to this aspect of the invention, the gene either encodes an RNA-binding protein or the product that it encodes acts on a RNA-binding protein.

[0135] In certain embodiments of the methods according to this aspect of the invention, the gene either encodes a component of a SCF complex or the product that it encodes acts on a component of a SCF complex.

[0136] In certain embodiments of the methods according to this aspect of the invention, the gene either encodes or the gene product acts on a biosynthetic enzyme. In certain embodiments of the methods according to this aspect of the invention, the gene acts on biosynthetic enzyme for the secondary metabolite to be produced.

[0137] In certain embodiments of the methods according to this aspect of the invention, the gene is selected from the group consisting of AAD34558, AAD34561, AAD34564, ATR1, ERG6, FCR1, GCN4, lovE, MDR1, PDR1, PDR3, PDR5, PDR10, PDR13, SNQ2, TRI12, YAP1, and any fungal homologs of the aforementioned genes.

[0138] In certain embodiments of the methods according to this aspect of the invention, the methods further comprise purifying the secondary metabolite from a culture of the fungus.

[0139] Improving Production of a Secondary Metabolite in a Fungus by Decreasing Production of Side Products or Non-Desired Secondary Metabolites

[0140] In a fourth aspect, the invention provides methods for improving production of a secondary metabolite in a fungus by decreasing production of side products or non-desired secondary metabolites, the method comprising modulating the expression of a gene involved in regulation of secondary metabolite production in a manner that decreases production of side products or non-desired secondary metabolites.

[0141] In certain embodiments of the methods according to this aspect of the invention, the modulation is overexpression of the gene.

[0142] Preferred genes according to this aspect of the invention include, without limitation, AAD34561, AAD34562, abaA, ACE2, ADR1, AFL1, aflR, AFT1, amyR, areA, ASH1, BAP2, BCY1, CAT8, CDC24, CDC25, CDC28, CDC42, CDC55, CLB2, creA, CTS1, CUP9, CYR1, DFG16, DHH1, DPH3, ELM1, facB, FLO1, FLO11, FLO8, FUS3, GCN2, GCN4, GCR1, GCR2, GLN3, GPA1, GPA2, GPR1, GRR1, GTS1, HAP1, HAP4, HIP1, HMS1, HMS2, HOG1, HSL1, HXK2, IME1, IME4, INO2, INV11, INV13, INV16, INV5, INV7, INV9, KSS1, LEU3, lovE, LYS14, MAC1, MCM1, MEP1, MEP2, MET28, MET31, MET4, metR, MGA1, MIG1, MIG2, MSN1, MSN2, MSN4, MSN5, MSS11, MTH1, NPR1, nreB, NRG1, OAF1, pacC, PBS2, PDE2, PET9, PHD1, PHO2, PHO4, PHO85, pkaR, PPR1, PTC1, PUT3, RAS1, RAS2, RGS2, RIM101, RIM13, RIM15, RIM9, ROX1, RRE1, SCH9, sconB, SFL1, SHO1, SHR3, SIN3, SIP4, SKN7, SNF1, SNF2, SNF7, SNF8, SOK2, SRB10, SRB11, SRB8, SRB9, sreA, sreP, SRV2, SSD1, SSN6, SST2, STE11, STE12, STE20, STE50, STE7, STP22, SWI4, SWI6, tamA, TEC1, TPK1, TPK2, TPK3, TUP1, UaY, UGA3, URE2, VPS28, VPS36, WHI3, YMR077c, YNL255c, YPR1, ZAP1, GanB, Gna3, FadA, Gna1, RfeH (PC23), RfeC (An09), lovU, Ste7, Nc1, Vps34, genes encoding bacterial protein toxins, and any fungal homologs of the aforementioned genes. Tables 5 and 6 include nucleic acid sequences for these genes as well as the predicted amino acid sequences of the proteins they encode. Homologs of these genes and proteins from other fungal species are also useful.

[0143] In certain embodiments of the methods according to this aspect of the invention, the modulation is expression of a dominant mutation of the gene.

[0144] In certain embodiments of the methods according to this aspect of the invention, the modulation is mediated by a peptide modulator of gene expression.

[0145] Peptides may be expressed in the cell or supplied exogenously. Preferably, they are provided on a scaffold to increase intracellular stability and to provide conformational constraint. Preferred peptides according to this aspect of the invention include those discussed earlier.

[0146] In certain embodiments of the methods according to this aspect of the invention, the peptide modulator is an activator of gene expression.

[0147] In certain embodiments of the methods according to this aspect of the invention, the peptide modulator is an inhibitor of gene expression.

[0148] In certain embodiments of the methods according to this aspect of the invention, the modulation is mediated by a small molecule modulator of gene expression. In certain embodiments of the methods according to this aspect of the invention, the small molecule modulator is an activator of gene expression. In certain embodiments of the methods according to this aspect of the invention, the small molecule modulator is an inhibitor of gene expression.

[0149] In certain embodiments of the methods according to this aspect of the invention, the modulation is conditional expression of the gene.

[0150] In certain embodiments of the methods according to this aspect of the invention, the gene either encodes a transcription factor or the product that it encodes acts on a transcription factor. Preferred transcription factors include, without limitation, transcription factors that modulate the expression of genes involved in the production or response to the small molecule cAMP (preferred examples include, without limitation, Mga1, Msn2, Msn4, Sfl1, and Sok2); transcription factors that function downstream of mitogen-activated protein (MAP) kinase signaling pathways that regulate the yeast invasion response (preferred examples include, without limitation, Mcm1, Ste12, and Tec1); transcription factors that modulate the expression of genes involved in nitrogen regulation (preferred examples include, without limitation, AreA, Gln3, Hms1, Hms2, NreB, TamA, and Uga3); transcription factors that modulate the expression of genes involved in pH regulation in fungi (preferred examples include, without limitation PacC and Rim101); general transcription factors (preferred examples include, without limitation, Sin3, Snf2, Srb8, Srb9, Srb10, Srb11, Ssn6, and Tup1); transcription factors that modulate the expression of genes involved in carbon metabolism (preferred examples include, without limitation, Adr1, Cat8, CreA, FacB, Gcr1, Gcr2, Hap4, Mig1, Mig2, Mth1, Nrg1, Oaf1, and Sip4); heme-dependent transcription factors (preferred examples include, without limitation, Hap1 and Rox1); transcription factors that modulate the expression of genes involved in the uptake of metals (preferred examples include, without limitation, Aft1, Cup9, Mac1, SreP, SreA, and Zap1); transcription factors that modulate the expression of genes involved in cell-cycle regulation (preferred examples include, without limitation, Skn7, Swi4, and Swi6); transcription factors that modulate the expression of genes involved in invasion (preferred examples include, without limitation, Ash1, Flo8, Gts1, Inv7, Msn1, Mss11, Phd1, and Rre1); transcription factors that modulate the expression of genes involved in amino acid biosynthesis or transport (preferred examples include, without limitation, Gcn4, Leu3, Lys14, Met4, Met28, Met31, MetR, Put3, SconB, and Uga3); transcription factors that modulate the expression of genes involved in phosphate metabolism or transport (preferred examples include, without limitation, Pho2 and Pho4); transcription factors that modulate the expression of genes involved in nucleotide metabolism or transport (preferred examples include, without limitation, Ppr1 and UaY); transcription factors that modulate the expression of genes involved in cell wall processes (preferred examples include, without limitation, Ace2, Swi4, and Swi6); transcription factors that modulate the expression of genes involved in sporulation (preferred examples include, without limitation, Ime1 and Ime4); transcription factors that modulate the expression of genes involved in phospholipid synthesis (preferred examples include, without limitation, Ino2); transcription factors that modulate the expression of genes involved in aflatoxin biosynthesis (preferred examples include, without limitation, AflR); transcription factors that modulate the expression of genes involved in lovastatin biosynthesis (preferred examples include, without limitation, AAD34561 and LovE); and transcription factors that modulate the expression of genes involved in filamentous fungal development (preferred examples include, without limitation, AbaA).

[0151] In certain embodiments of the methods according to this aspect of the invention, the gene either encodes a transmembrane transporter or the product that it encodes acts on a transmembrane transporter. Preferred classes of transmembrane transporters include, without limitation, proteins of the ATP-binding cassette superfamily, members of the Major Facilitator Superfamily (MFS) that include, without limitation Pump1 and Pump2, P-type ATPases, members of the mitochondrial carrier family (MCF) that include, without limitation, Pet9 and AAD34562, ion channels, permeases that include, without limitation, Bap2, Hip1, Mep1, and Mep2; and components that transport sugars, ions, or metals.

[0152] In certain embodiments of the methods according to this aspect of the invention, the gene either encodes a kinase or the product that it encodes acts on a kinase. Preferred kinases include, without limitation, Cdc28, Elm1, Fus3, Gcn2, Hog1, Hsl1, Hxk2, Kss1, Pbs2, Pho85, Rim15, Ste7, Sch9, Snf1, Ste11, Ste20, Tpk1, Tpk2, and Tpk3.

[0153] In certain embodiments of the methods according to this aspect of the invention, the gene either encodes a G-protein or the product that it encodes acts on a G-protein. Preferred G-proteins include, without limitation Cdc42, FadA, Gpa1, Gpa2, Ras1, and Ras2.

[0154] In certain embodiments of the methods according to this aspect of the invention, the gene either encodes a cell surface receptor or the product that it encodes acts on a cell surface receptor. Preferred cell surface receptors include, without limitation, G-protein coupled receptors. Preferred G-protein coupled receptors include, without limitation, Gpr1.

[0155] In certain embodiments of the methods according to this aspect of the invention, the gene either encodes a GTPase activating protein or the product that it encodes acts on a GTPase activating protein. Preferred GTPase activating proteins include, without limitation, RGS family members. Preferred RGS family members include, without limitation, FlbA, Rgs2, and Sst2.

[0156] In certain embodiments of the methods according to this aspect of the invention, the gene either encodes a guanine nucleotide exchange factor or the product that it encodes acts on a guanine nucleotide exchange factor. Preferred guanine nucleotide exchange factors include, without limitation, Cdc24 and Cdc25.

[0157] In certain embodiments of the methods according to this aspect of the invention, the gene either encodes a phosphatase or the product that it encodes acts on a phosphatase.

[0158] Preferred phosphatases include, without limitation, Cdc55 and Ptc1.

[0159] In certain embodiments of the methods according to this aspect of the invention, the gene either encodes a protease or the product that it encodes acts on a protease. Preferred proteases include, without limitation, Rim 13 and LF.

[0160] In certain embodiments of the methods according to this aspect of the invention, the gene either encodes a cyclic nucleotide phosphodiesterase or the product that it encodes acts on a cyclic nucleotide phosphodiesterase. Preferred examples of cyclic nucleotide phosphodiesterases include, without limitation, Pde2.

[0161] In certain embodiments of the methods according to this aspect of the invention, the gene either encodes a bacterial protein toxin or the product that it encodes acts on a bacterial protein toxin. Preferred bacterial protein toxins include, without limitation, Anthrax toxin edema factor (EF; Bacillus anthracis), Anthrax toxin lethal factor (LF; Bacillus anthracis), adenylate cyclase toxin (Bordetella pertussis), Cholera enterotoxin (Vibrio cholerae), LT toxin (Escherichia coli), ST toxin (E. coli), Shiga toxin (Shigella dysenteriae), Perfringens enterotoxin (Clostridium perfringens), Botulinum toxin (Clostridium botulinum), Tetanus toxin (Clostridium tetani), Diphtheria toxin (Corynebacterium diphtheriae), Exotoxin A (Pseudomonas aeruginosa), Exoenzyme S (P. aeruginosa), Pertussis toxin (Bordetella pertussis), alpha and epsilon toxins (C. perfringens), lethal toxin (LT; Clostridium sordellii), toxins A and B (Clostridium dificile), and phospholipase C (Clostridium bifermentans).

[0162] In certain embodiments of the methods according to this aspect of the invention, the gene either encodes an importin protein or the product that it encodes acts on an importin protein. Preferred examples of importin proteins include, without limitation, Msn5.

[0163] In certain embodiments of the methods according to this aspect of the invention, the gene either encodes a RNA-binding protein or the product that it encodes acts on a RNA-binding protein. Preferred examples of RNA-binding proteins include, without limitation, Dhh1 and Whi3.

[0164] In certain embodiments of the methods according to this aspect of the invention, the gene either encodes a component of a SCF complex or the product that it encodes acts on a component of a SCF complex. Preferred examples of components of a SCF complex include, without limitation, Grr1.

[0165] In certain embodiments of the methods according to this aspect of the invention, the gene either encodes or the gene product acts on a biosynthetic enzyme. In certain embodiments of the methods according to this aspect of the invention, the gene acts on biosynthetic enzyme for the secondary metabolite to be produced.

[0166] In certain embodiments of the methods according to this aspect of the invention, the gene is selected from the group consisting of AAD34561, AAD34562, abaA, ACE2, ADR1, AFL1, aflR, AFT1, amyR, area, ASH1, BAP2, BCY1, CAT8, CDC24, CDC25, CDC28, CDC42, CDC55, CLB2, creA, CTS1, CUP9, CYR1, DFG16, DHH1, DPH3, ELM1, facB, FLO1, FLO11, FLO8, FUS3, GCN2, GCN4, GCR1, GCR2, GLN3, GPA1, GPA2, GPR1, GRR1, GTS1, HAP1, HAP4, HIP1, HMS1, HMS2, HOG1, HSL1, HXK2, IME1, IME4, INO2, INV11, INV13, INV16, INV5, INV7, INV9, KSS1, LEU3, lovE, LYS14, MAC1, MCM1, MEP1, MEP2, MET28, MET31, MET4, metR, MGA1, MIG1, MIG2, MSN1, MSN2, MSN4, MSN5, MSS11, MTH1, NPR1, nreB, NRG1, OAF1, pacC, PBS2, PDE2, PET9, PHD1, PHO2, PHO4, PHO85, pkaR, PPR1, PTC1, PUT3, RAS1, RAS2, RGS2, RIM101, RIM13, RIM15, INV13, INV16, INV5, INV7, INV9, KSS1, LEU3, lovE, LYS14, MAC1, MCM1, MEP1, MEP2, MET28, MET31, MET4, metR, MGA1, MIG1, MIG2, MSN1, MSN2, MSN4, MSN5, MSS11, MTH1, NPR1, nreB, NRG1, OAF1, pacC, PBS2, PDE2, PET9, PHD1, PHO2, PHO4, PHO85, pkaR, PPR1, PTC1, PUT3, RAS1, RAS2, RGA1, RGS2, RHO1, RHO2, RHO3, RHO4, RIM101, RIM13, RIM15, RIM9, ROX1, RRE1, RSR1, SCH9, sconB, SFL1, SHO1, SHR3, SIN3, SIP4, SKN7, SNF1, SNF2, SNF7, SNF8, SOK2, SRB10, SRB11, SRB8, SRB9, sreA, sreP, SRV2, SSD1, SSN6, SST2, STE11, STE12, STE20, STE50, STE7, STP22, SWI4, SWI6, tamA, TEC1, TPK1, TPK2, TPK3, TUP1, UaY, UGA3, URE2, VPS28, VPS36, WHI3, YMR077c, YNL255c, YPR1, ZAP1, GanB, Gna3, FadA, Gna1, RfeH (PC23), RfeC (An09), lovU, Ste7, Nc1, Vps34, genes encoding bacterial protein toxins, and any fungal homologs of the aforementioned genes. Tables 5 and 6 include nucleic acid sequences for these genes as well as the predicted amino acid sequences of the proteins they encode. Homologs of these genes and proteins from other fungal species are also useful.

[0167] In certain embodiments of the methods according to this aspect of the invention, the modulation is expression of a dominant mutation of the gene. Preferred dominant mutations according to this aspect of the invention are as used before.

[0168] In certain embodiments of the methods according to this aspect of the invention, the modulation is mediated by a peptide modulator of gene expression. Peptides may be expressed in the cell or supplied exogenously. Preferably, they are provided on a scaffold to increase intracellular stability and to provide conformational constraint. Preferred peptides according to this aspect of the invention include those discussed earlier.

[0169] In certain embodiments of the methods according to this aspect of the invention, the peptide modulator is an activator of gene expression.

[0170] In certain embodiments of the methods according to this aspect of the invention, the peptide modulator is an inhibitor of gene expression.

[0171] In certain embodiments of the methods according to this aspect of the invention, the modulation is mediated by a small molecule modulator of gene expression. In certain embodiments of the methods according to this aspect of the invention, the small molecule modulator is an activator of gene expression. In certain embodiments of the methods according to this aspect of the invention, the small molecule modulator is an inhibitor of gene expression.

[0172] In certain embodiments of the methods according to this aspect of the invention, the modulation is conditional expression of the gene.

[0173] In certain embodiments of the methods according to this aspect of the invention, the gene either encodes a transcription factor or the product that it encodes acts on a transcription factor. Preferred transcription factors include, without limitation, transcription factors that modulate the expression of genes involved in the production or response to the small molecule cAMP (preferred examples include, without limitation, Mga1, Msn2, Msn4, Sfl1, and Sok2); transcription factors that function downstream of mitogen-activated protein (MAP) kinase signaling pathways that regulate the yeast invasion response (preferred examples include, without limitation, Mcm1, Ste12, and Tec1); transcription factors that modulate the expression of genes involved in nitrogen regulation (preferred examples include, without limitation, AreA, Gln3, Hms1, Hms2, NreB, TamA, and Uga3); transcription factors that modulate the expression of genes involved in pH regulation in fungi (preferred examples include, without limitation PacC and Rim101); general transcription factors (preferred examples include, without limitation, Sin3, Snf2, Srb8, Srb9, Srb10, Srb11, Ssn6, and Tup1); transcription factors that modulate the expression of genes involved in carbon metabolism (preferred examples include, without limitation, Adr1, Cat8, CreA, FacB, Gcr1, Gcr2, Hap4, Mig1, Mig2, Mth1, Nrg1, Oaf1, and Sip4); heme-dependent transcription factors (preferred examples include, without limitation, Hap1 and Rox1); transcription factors that modulate the expression of genes involved in the uptake of metals (preferred examples include, without limitation, Aft1, Cup9, Mac1, SreP, SreA, and Zap1); transcription factors that modulate the expression of genes involved in cell-cycle regulation (preferred examples include, without limitation, Skn7, Swi4, and Swi6); transcription factors that modulate the expression of genes involved in invasion (preferred examples include, without limitation, Ash1, Flo8, Gts1, Inv7, Msn1, Mss11, Phd1, and Rre1); transcription factors that modulate the expression of genes involved in amino acid biosynthesis or transport (preferred examples include, without limitation, Gcn4, Leu3, Lys14, Met4, Met28, Met31, MetR, Put3, SconB, and Uga3); transcription factors that modulate the expression of genes involved in phosphate metabolism or transport (preferred examples include, without limitation, Pho2 and Pho4); transcription factors that modulate the expression of genes involved in nucleotide metabolism or transport (preferred examples include, without limitation, Ppr1 and UaY); transcription factors that modulate the expression of genes involved in cell wall processes (preferred examples include, without limitation, Ace2, Swi4, and Swi6); transcription factors that modulate the expression of genes involved in sporulation (preferred examples include, without limitation, Ime1 and Ime4); transcription factors that modulate the expression of genes involved in phospholipid synthesis (preferred examples include, without limitation, Ino2); transcription factors that modulate the expression of genes involved in aflatoxin biosynthesis (preferred examples include, without limitation, AflR); transcription factors that modulate the expression of genes involved in lovastatin biosynthesis (preferred examples include, without limitation, AAD34561 and LovE); and transcription factors that modulate the expression of genes involved in filamentous fungal development (preferred examples include, without limitation, AbaA).

[0174] In certain embodiments of the methods according to this aspect of the invention, the gene either encodes a transmembrane transporter or the product that it encodes acts on a transmembrane transporter. Preferred classes of transmembrane transporters include, without limitation, proteins of the ATP-binding cassette superfamily, members of the Major Facilitator Superfamily (MFS) that include, without limitation Pump1 and Pump2, P-type ATPases, members of the mitochondrial carrier family (MCF) that include, without limitation, Pet9, ion channels, permeases that include, without limitation, Bap2, Hip1, Mep1, and Mep2; and components that transport sugars, ions, or metals.

[0175] In certain embodiments of the methods according to this aspect of the invention, the gene either encodes a kinase or the product that it encodes acts on a kinase. Preferred kinases include, without limitation, Cdc28, Elm1, Fus3, Gcn2, Hog1, Hsl1, Hxk2, Kss1, Pbs2, Pho85, Rim15, Ste7, Sch9, Snf1, Ste11, Ste20, Tpk1, Tpk2, and Tpk3.

[0176] In certain embodiments of the methods according to this aspect of the invention, the gene either encodes a G-protein or the product that it encodes acts on a G-protein. The term Preferred G-proteins include, without limitation Cdc42, FadA, Gpa1, Gpa2, Ras1, Ras2, Rho1, Rho2, Rho3, Rho4, and Rsr1.

[0177] In certain embodiments of the methods according to this aspect of the invention, the gene either encodes a cell surface receptor or the product that it encodes acts on a cell surface receptor. Preferred cell surface receptors include, without limitation, G-protein coupled receptors. Preferred G-protein coupled receptors include, without limitation, Gpr1.

[0178] In certain embodiments of the methods according to this aspect of the invention, the gene either encodes a GTPase activating protein or the product that it encodes acts on a GTPase activating protein. Preferred GTPase activating proteins include, without limitation, RGS family members. Preferred RGS family members include, without limitation, FlbA, Rgs2, and Sst2. Preferred examples of non-RGS family GTPase-activating proteins include, without limitation, Bem2, Bem3, Bud2, Rga1, and Rga2.

[0179] In certain embodiments of the methods according to this aspect of the invention, the gene either encodes a guanine nucleotide exchange factor or the product that it encodes acts on a guanine nucleotide exchange factor. Preferred guanine nucleotide exchange factors include, without limitation, Bud5, Cdc24, and Cdc25.

[0180] In certain embodiments of the methods according to this aspect of the invention, the gene either encodes a phosphatase or the product that it encodes acts on a phosphatase. Preferred phosphatases include, without limitation, Cdc55 and Ptc1.

[0181] In certain embodiments of the methods according to this aspect of the invention, the gene either encodes a protease or the product that it encodes acts on a protease. Preferred proteases include, without limitation, Rim13 and LF.

[0182] In certain embodiments of the methods according to this aspect of the invention, the gene either encodes a cyclic nucleotide phosphodiesterase or the product that it encodes acts on a cyclic nucleotide phosphodiesterase. Preferred examples of cyclic nucleotide phosphodiesterases include, without limitation, Pde2.

[0183] In certain embodiments of the methods according to this aspect of the invention, the gene either encodes a bacterial protein toxin or the product that it encodes acts on a bacterial protein toxin. Preferred bacterial protein toxins include, without limitation, Anthrax toxin edema factor (EF; Bacillus anthracis), Anthrax toxin lethal factor (LF; Bacillus anthracis), adenylate cyclase toxin (Bordetella pertussis), Cholera enterotoxin (Vibrio cholerae), LT toxin (Escherichia coli), ST toxin (E. coli), Shiga toxin (Shigella dysenteriae), Perfringens enterotoxin (Clostridium perfringens), Botulinum toxin (Clostridium botulinum), Tetanus toxin (Clostridium tetani), Diphtheria toxin (Corynebacterium diphtheriae), Exotoxin A (Pseudomonas aeruginosa), Exoenzyme S (P. aeruginosa), Pertussis toxin (Bordetella pertussis), alpha and epsilon toxins (C. perfringens), lethal toxin (LT; Clostridium sordellii), toxins A and B (Clostridium dificile), and phospholipase C (Clostridium bifermentans).

[0184] In certain embodiments of the methods according to this aspect of the invention, the gene either encodes an importin protein or the product that it encodes acts on an importin protein. Preferred examples of importin proteins include, without limitation, Msn5.

[0185] In certain embodiments of the methods according to this aspect of the invention, the gene either encodes a RNA-binding protein or the product that it encodes acts on a RNA-binding protein. Preferred examples of RNA-binding proteins include, without limitation, Dhh1 and Whi3.

[0186] In certain embodiments of the methods according to this aspect of the invention, the gene either encodes a component of a SCF complex or the product that it encodes acts on a component of a SCF complex. Preferred examples of components of a SCF complex include, without limitation, Grr1.

[0187] In certain embodiments of the methods according to this aspect of the invention, the gene either encodes an adherin or the product that it encodes acts on an adherin. The term “adherin” means a molecule that functions to promote the interaction of a cell with another component, including, without limitation, interaction with other cells of the same genotype, interaction with cells of a different genotype, and interaction with growth substrates. Preferred examples of adherins include, without limitation, Aga1, Aga2, Flo1, Flo10, Flo1, Flo5, and Flo9.

[0188] In certain embodiments of the methods according to this aspect of the invention, the gene either encodes or the gene product acts on a biosynthetic enzyme. In certain embodiments of the methods according to this aspect of the invention, the gene acts on biosynthetic enzyme for the secondary metabolite to be produced.

[0189] In certain embodiments of the methods according to this aspect of the invention, the gene is selected from the group consisting of AAD34561, abaA, ACE2, ADR1, AFL1, aflR, AFT1, AGA1, AGA2, amyR, areA, ASH1, BAP2, BCY1, BEM1, BEM2, BEM3, BNI1, BUD2, BUD5, CAT8, CDC24, CDC25, CDC28, CDC42, CDC55, CLB2, creA, CTS1, CUP9, CYR1, DFG16, DHH1, DPH3, ELM1, facB, FLO1, FLO10, FLO11, FLO5, FLO8, FLO9, FUS3, GCN2, GCN4, GCR1, GCR2, GIC1, GIC2, GLN3, GPA1, GPA2, GPR1, GRR1, GTS1, HAP1, HAP4, HIP1, HMS1, HMS2, HOG1, HSL1, HXK2, IME1, IME4, INO2, INV1, INV13, INV16, INV5, INV7, INV9, KSS1, LEU3, lovE, LYS14, MAC1, MCM1, MEP1, MEP2, MET28, MET31, MET4, metR, MGA1, MIG1, MIG2, MSN1, MSN2, MSN4, MSN5, MSS11, MTH1, NPR1, nreB, NRG1, OAF1, pacC, PBS2, PDE2, PET9, PHD1, PHO2, PHO4, PHO85, pkaR, PPR1, PTC1, PUT3, RAS1, RAS2, RGA1, RGS2, RHO1, RHO2, RHO3, RHO4, RIM101, RIM13, RIM15, RIM9, ROX1, RRE1, RSR1, SCH9, sconB, SFL1, SHO1, SHR3, SIN3, SIP4, SKI7, SNF1, SNF2, SNF7, SNF8, SOK2, SRB10, SRB11, SRB8, SRB9, sreA, sreP, SRV2, SSD1, SSN6, SST2, STE11, STE12, STE20, STE50, STE7, STP22, SWI4, SWI6, tamA, TEC1, TPK1, TPK2, TPK3, TUP1, UaY, UGA3, URE2, VPS28, VPS36, WHI3, YMR077c, YNL255c, YPR1, ZAP1, GanB, Gna3, FadA, Gna1, RfeH (PC23), RfeC (An09), lovU, Ste7, Nc1, Vps34, genes encoding bacterial protein toxins, and any fungal homologs of the aforementioned genes. Tables 5 and 6 include nucleic acid sequences for these genes as well as the predicted amino acid sequences of the proteins they encode. Homologs of these genes and proteins from other fungal species are also useful. In certain embodiments of the methods according to this aspect of the invention, the methods further comprise purifying the secondary metabolite from a culture of the fungus.

[0190] Improving Production of a Secondary Metabolite in a Fungus by Altering the Characteristics of the Fungus in a Manner that is Beneficial to the Production of the Secondary Metabolite

[0191] In a sixth aspect, the invention provides methods for improving production of a secondary metabolite in a fungus by altering the characteristics of the fungus in a manner that is beneficial to the production of the secondary metabolite, the method comprising modulating the expression of a gene involved in regulation of secondary metabolite production in a manner that causes conditional lysis. “Causing conditional lysis” means causing the fungus to grow without lysis under a first set of growth conditions and to lyse under a second and different set of conditions, which are not lytic to the unmodified fungus. In preferred embodiments, the conditions that can be altered between the first and second growth conditions include, without limitation, the source or amount of nutrients such as carbon, nitrogen, and phosphate; the source or amount of specific enzymes; the source or amount of specific components found in cell walls; the amount of salts or osmolytes; the pH of the medium, the partial oxygen pressure, or temperature; and the amount of specific small molecules.

[0192] In certain embodiments of the methods according to this aspect of the invention, the modulation is overexpression of the gene. Preferred genes according to this aspect of the invention include, without limitation, ACE2, BCK1, BGL2, CHS1, CHS2, CHS3, CTS1, FKS1, GSC2, HOG1, ISR1, KRE6, MID2, MKK1, MKK2, PBS2, PKC1, PPH21, PPH22, PPZ1, PPZ2, PTP2, PTP3, RHO1, RLM1, ROM1, ROM2, SHO1, SKN1, SLG1, SLN1, SLT2, SMP1, SSK1, SSK2, SSK22, STE11, STT3, STT4, SWI4, SWI6, VPS45, WSC2, WSC3, WSC4, and YPD1.

[0193] In certain embodiments of the methods according to this aspect of the invention, the modulation is expression of a dominant mutation of the gene. Preferred dominant mutations according to this aspect of the invention are as used before.

[0194] In certain embodiments of the methods according to this aspect of the invention, the modulation is mediated by a peptide modulator of gene expression. Peptides may be expressed in the cell or supplied exogenously. Preferably, they are provided on a scaffold to increase intracellular stability and to provide conformational constraint. Preferred peptides according to this aspect of the invention include those discussed earlier.

[0195] In certain embodiments of the methods according to this aspect of the invention, the peptide modulator is an activator of gene expression.

[0196] In certain embodiments of the methods according to this aspect of the invention, the peptide modulator is an inhibitor of gene expression.

[0197] In certain embodiments of the methods according to this aspect of the invention, the modulation is mediated by a small molecule modulator of gene expression. In certain embodiments of the methods according to this aspect of the invention, the small molecule modulator is an activator of gene expression. In certain embodiments of the methods according to this aspect of the invention, the small molecule modulator is an inhibitor of gene expression.

[0198] In certain embodiments of the methods according to this aspect of the invention, the modulation is conditional expression of the gene. Among the promoters useful for conditional expression of a gene are the P. chrysogenum xylanase promoter and the A. nidulans xylanase promoter.

[0199] In certain embodiments of the methods according to this aspect of the invention, the gene either encodes a transcription factor or the product that it encodes acts on a transcription factor. Preferred transcription factors include, without limitation, Ace2, Rlm1, Smp1, Swi4, and Swi6.

[0200] In certain embodiments of the methods according to this aspect of the invention, the gene either encodes a transmembrane transporter or the product that it encodes acts on a transmembrane transporter.

[0201] In certain embodiments of the methods according to this aspect of the invention, the gene either encodes a kinase or the product that it encodes acts on a kinase. Preferred kinases include, without limitation, Bck1, Hog1, Isr1, Mkk1, Mkk2, Pbs2, Pkc1, Slt2, Ssk2, and Ssk22.

[0202] In certain embodiments of the methods according to this aspect of the invention, the gene either encodes a component involved in cell wall biosynthesis or the product that it encodes acts on a component involved in cell wall biosynthesis. Preferred classes of components involved in cell wall biosynthesis include, without limitation, glucan synthases, glucanases, chitin synthase, and chitinases. Preferred examples of components involved in cell wall biosynthesis include, without limitation, Bgl2, Chs1, Chs2, Chs3, Cts1, Fks1, Gsc2, Kre6, and Skn1.

[0203] In certain embodiments of the methods according to this aspect of the invention, the gene either encodes a G-protein or the product that it encodes acts on a G-protein. A “G-protein” is a guanyl-nucleotide binding protein. Preferred G-proteins include, without limitation Rho1.

[0204] In certain embodiments of the methods according to this aspect of the invention, the gene either encodes a cell surface receptor or the product that it encodes acts on a cell surface receptor. Preferred cell surface receptors include, without limitation, Sho1 and Sln1.

[0205] In certain embodiments of the methods according to this aspect of the invention, the gene either encodes a GTPase activating protein or the product that it encodes acts on a GTPase activating protein.

[0206] In certain embodiments of the methods according to this aspect of the invention, the gene either encodes a guanine nucleotide exchange factor or the product that it encodes acts on a guanine nucleotide exchange factor. Preferred guanine nucleotide exchange factors include, without limitation, Rom1 and Rom2.

[0207] In certain embodiments of the methods according to this aspect of the invention, the gene either encodes a phosphatase or the product that it encodes acts on a phosphatase. Preferred phosphatases include, without limitation, Pph21, Pph22, Ppz1, Ppz2, Ptp2, Ptp3, and Ptc1.

[0208] In certain embodiments of the methods according to this aspect of the invention, the gene either encodes a protease or the product that it encodes acts on a protease.

[0209] In certain embodiments of the methods according to this aspect of the invention, the gene either encodes a cyclic nucleotide phosphodiesterase or the product that it encodes acts on a cyclic nucleotide phosphodiesterase.

[0210] In certain embodiments of the methods according to this aspect of the invention, the gene either encodes a bacterial protein toxin or the product that it encodes acts on a bacterial protein toxin.

[0211] In certain embodiments of the methods according to this aspect of the invention, the gene either encodes an importin or the product that it encodes acts on an importin protein.

[0212] In certain embodiments of the methods according to this aspect of the invention, the gene either encodes a RNA-binding protein or the product that it encodes acts on a RNA-binding protein.

[0213] In certain embodiments of the methods according to this aspect of the invention, the gene either encodes a component of a SCF complex or the product that it encodes acts on a component of a SCF complex.

[0214] In certain embodiments of the methods according to this aspect of the invention, the gene either encodes or the gene product acts on a biosynthetic enzyme. In certain embodiments of the methods according to this aspect of the invention, the gene acts on biosynthetic enzyme for the secondary metabolite to be produced.

[0215] In certain embodiments of the methods according to this aspect of the invention, the gene is selected from the group consisting of ACE2, BCK1, BGL2, CHS1, CHS2, CHS3, CTS1, FKS1, GSC2, HOG1, ISR1, KRE6, MID2, MKK1, MKK2, PBS2, PKC1, PPH21, PPH22, PPZ1, PPZ2, PTP2, PTP3, RHO1, RLM1, ROM1, ROM2, SHO1, SKN1, SLG1, SLN1, SLT2, SMP1, SSK1, SSK2, SSK22, STE11, STT3, STT4, SWI4, SWI6, VPS45, WSC2, WSC3, WSC4, YPD1, and fungal homologs of the aforementioned genes.

[0216] In certain embodiments of the methods according to this aspect of the invention, the methods further comprise purifying the secondary metabolite from a culture of the fungus.

[0217] Improving Production of a Secondary Metabolite in a Fungus by Increasing the Resistance of the Fungus to the Deleterious Effects of Exposure to a Secondary Metabolite

[0218] In a seventh aspect, the invention provides methods for improving production of a secondary metabolite in a fungus by increasing the resistance of the fungus to the deleterious effects of exposure to a secondary metabolite made by the same organism, the method comprising modulating the expression of a gene involved in regulation of secondary metabolite production in a manner that increases resistance to the deleterious effects of exposure to a secondary metabolite. “Increasing the resistance of the fungus to the deleterious effects of exposure to a secondary metabolite” means to allow the fungus to survive, grow, or produce secondary metabolite in conditions that otherwise would be toxic or prevent production of secondary metabolite.

[0219] In certain embodiments of the methods according to this aspect of the invention, the modulation is overexpression of the gene. Preferred genes according to this aspect of the invention include, without limitation, AAD34558, AAD34561, AAD34564, ATR1, ERG6, ERG11, FCR1, GCN4, lovE, MDR1, PDR1, PDR3, PDR5, PDR11, PDR13, SNQ2, TRI12, YAP1, fungal homologs of the aforementioned genes, and genes that encode β-tubulin, calcineurin (including, without limitation, CNA1), chitin synthase, glucan synthase, HMG CoA reductase, N-terminal aminopeptidases, and RNA polymerase II.

[0220] In certain embodiments of the methods according to this aspect of the invention, the modulation is expression of a dominant mutation of the gene. Preferred dominant mutations according to this aspect of the invention are as used before.

[0221] In certain embodiments of the methods according to this aspect of the invention, the modulation is mediated by a peptide modulator of gene expression. Peptides may be expressed in the cell or supplied exogenously. Preferably, they are provided on a scaffold to increase intracellular stability and to provide conformational constraint. Preferred peptides according to this aspect of the invention include those discussed earlier.

[0222] In certain embodiments of the methods according to this aspect of the invention, the peptide modulator is an activator of gene expression.

[0223] In certain embodiments of the methods according to this aspect of the invention, the peptide modulator is an inhibitor of gene expression.

[0224] In certain embodiments of the methods according to this aspect of the invention, the modulation is mediated by a small molecule modulator of gene expression. In certain embodiments of the methods according to this aspect of the invention, the small molecule modulator is an activator of gene expression. In certain embodiments of the methods according to this aspect of the invention, the small molecule modulator is an inhibitor of gene expression.

[0225] In certain embodiments of the methods according to this aspect of the invention, the modulation is conditional expression of the gene. Among the promoters useful for conditional expression of a gene are the P. chrysogenum xylanase promoter and the A. nidulans xylanase promoter.

[0226] In certain embodiments of the methods according to this aspect of the invention, the gene either encodes a transcription factor or the product that it encodes acts on a transcription factor. Preferred transcription factors include, without limitation, AAD34561, Fcr1, Gcn4, LovE, Pdr1, Pdr3, and Yap1.

[0227] In certain embodiments of the methods according to this aspect of the invention, the gene either encodes a transmembrane transporter or the product that it encodes acts on a transmembrane transporter. Preferred transmembrane transporters include, without limitation, AAD34558, AAD34564, Atr1, Mdr1, Pdr5, Pdr10, Snq2, and Tri12.

[0228] In certain embodiments of the methods according to this aspect of the invention, the gene either encodes a kinase or the product that it encodes acts on a kinase.

[0229] In certain embodiments of the methods according to this aspect of the invention, the gene either encodes a G-protein or the product that it encodes acts on a G-protein.

[0230] In certain embodiments of the methods according to this aspect of the invention, the gene either encodes a cell surface receptor or the product that it encodes acts on a cell surface receptor.

[0231] In certain embodiments of the methods according to this aspect of the invention, the gene either encodes a GTPase activating protein or the product that it encodes acts on a GTPase activating protein.

[0232] In certain embodiments of the methods according to this aspect of the invention, the gene either encodes a guanine nucleotide exchange factor or the product that it encodes acts on a guanine nucleotide exchange factor.

[0233] In certain embodiments of the methods according to this aspect of the invention, the gene either encodes a phosphatase or the product that it encodes acts on a phosphatase.

[0234] In certain embodiments of the methods according to this aspect of the invention, the gene either encodes a protease or the product that it encodes acts on a protease.

[0235] In certain embodiments of the methods according to this aspect of the invention, the gene either encodes a cyclic nucleotide phosphodiesterase or the product that it encodes acts on a cyclic nucleotide phosphodiesterase.

[0236] In certain embodiments of the methods according to this aspect of the invention, the gene either encodes a bacterial protein toxin or the product that it encodes acts on a bacterial protein toxin.

[0237] In certain embodiments of the methods according to this aspect of the invention, the gene either encodes an importin protein or the product that it encodes acts on an importin protein.

[0238] In certain embodiments of the methods according to this aspect of the invention, the gene either encodes a RNA-binding protein or the product that it encodes acts on a RNA-binding protein.

[0239] In certain embodiments of the methods according to this aspect of the invention, the gene either encodes a component of a SCF complex or the product that it encodes acts on a component of a SCF complex.

[0240] In certain embodiments of the methods according to this aspect of the invention, the gene either encodes or the gene product acts on a biosynthetic enzyme. In certain embodiments of the methods according to this aspect of the invention, the gene acts on biosynthetic enzyme for the secondary metabolite to be produced.

[0241] In certain embodiments of the methods according to this aspect of the invention, the gene is selected from the group consisting of AAD34558, AAD34561, AAD34564, ATR1, ERG6, ERG11, FCR1, GCN4, lovE, MDR1, PDR1, PDR3, PDR5, PDR10, PDR13, SNQ2, TRI12, YAP1, fungal homologs of the aforementioned genes, and genes that encode beta-tubulin, calcineurin (including, without limitation, CNA1), chitin synthase, glucan synthase, HMG CoA reductase, N-terminal aminopeptidases, and RNA polymerase II.

[0242] In certain embodiments of the methods according to this aspect of the invention, the methods further comprise purifying the secondary metabolite from a culture of the fungus.

[0243] Genetically Modified Fungi

[0244] In an eighth aspect, the invention provides genetically modified fungi, wherein the genetically modified fungi have an ability to produce secondary metabolites and the ability of the genetically modified fungus to produce secondary metabolites has been improved by any of the methods according to the invention.

[0245] Methods for Making a Secondary Metabolite

[0246] In a ninth aspect, the invention provides a method for making a secondary metabolite, the method comprising culturing a fungus that is genetically modified according to the invention under conditions suitable for the production of secondary metabolites. “Conditions suitable for the production of secondary metabolites” means culture conditions under which the fungus does in fact produce one or more secondary metabolite.

[0247] Secondary Metabolites

[0248] In certain embodiments of the methods of the invention, the secondary metabolite is an anti-bacterial. An “anti-bacterial” is a molecule that has cytocidal or cytostatic activity against some or all bacteria. Preferred anti-bacterials include, without limitation, β-lactams. Prefererred β-lactams include, without limitation, penicillins and cephalosporins and biosynthetic intermediates thereof. Preferred penicillins and biosynthetic intermediates include, without limitation, isopenicillin N, 6-aminopenicillanic acid (6-APA), penicillin G, penicillin N, and penicillin V. Preferred cephalosporins and biosynthetic intermediates include, without limitation, deacetoxycephalosporin V (DAOC V), deacetoxycephalosporin C (DAOC), deacetylcephalosporin C (DAC), 7-aminodeacetoxycephalosporanic acid (7-ADCA), cephalosporin C, 7-B-(5-carboxy-5-oxopentanamido)-cephalosporanic acid (keto-AD-7ACA), 7-B-(4-carboxybutanamido)-cephalosporanic acid (GL-7ACA), and 7-aminocephalosporanic acid (7ACA).

[0249] In certain embodiments of the methods of the invention, the secondary metabolite is an anti-hypercholesterolemic or a biosynthetic intermediate thereof. An “anti-hypercholesterolemic” is a drug administered to a patient diagnosed with elevated cholesterol levels, for the purpose of lowering the cholesterol levels. Preferred anti-hypercholesterolemics include, without limitation, lovastatin, mevastatin, simvastatin, and pravastatin.

[0250] In certain embodiments of the methods of the invention, the secondary metabolite is an immunosuppressant or a biosynthetic intermediate thereof. An “immunosuppressant” is a molecule that reduces or eliminates an immune response in a host when the host is challenged with an immunogenic molecule, including immunogenic molecules present on transplanted organs, tissues or cells. Preferred immunosuppressants include, without limitation, members of the cyclosporin family and beauverolide L. Preferred cyclosporins include, without limitation, cyclosporin A and cyclosporin C.

[0251] In certain embodiments of the methods of the invention, the secondary metabolite is an ergot alkaloid or a biosynthetic intermediate thereof. An “ergot alkaloid” is a member of a large family of alkaloid compounds that are most often produced in the sclerotia of fungi of the genus Claviceps. An “alkaloid” is a small molecule that contains nitrogen and has basic pH characteristics. The classes of ergot alkaloids include clavine alkaloids, lysergic acids, lysergic acid amides, and ergot peptide alkaloids. Preferred ergot alkaloids include, without limitation, ergotamine, ergosine, ergocristine, ergocryptine, ergocornine, ergotaminine, ergosinine, ergocristinine, ergocryptinine, ergocorninine, ergonovine, ergometrinine, and ergoclavine.

[0252] In certain embodiments of the methods of the invention, the secondary metabolite is an inhibitor of angiogenesis or a biosynthetic intermediate thereof. An “angiogenesis inhibitor” is a molecule that decreases or prevents the formation of new blood vessels. Angiogenesis inhibitors have proven effective in the treatment of several human diseases including, without limitation, cancer, rheumatoid arthritis, and diabetic retinopathy. Preferred inhibitors of angiogenesis include, without limitation, fumagillin and ovalicin.

[0253] In certain embodiments of the methods of the invention, the secondary metabolite is a glucan synthase inhibitor or a biosynthetic intermediate thereof. A “glucan synthase inhibitor” is a molecule that decreases or inhibits the production of 1,3-β-D-glucan, a structural polymer of fungal cell walls. Glucan synthase inhibitors are a class of antifungal agents. Preferred glucan synthase inhibitors include, without limitation, echinocandin B, pneumocandin B, aculeacin A, and papulacandin.

[0254] In certain embodiments of the methods of the invention, the secondary metabolite is a member of the gliotoxin family of compounds or a biosynthetic intermediate thereof. The “gliotoxin family of compounds” are related molecules of the epipolythiodioxopiperazine class. Gliotoxins display diverse biological activities, including, without limitation, antimicrobial, antifungal, antiviral, and immunomodulating activities. Preferred members of the “gliotoxin family of compounds” include, without limitation, gliotoxin and aspirochlorine.

[0255] In certain embodiments of the methods of the invention, the secondary metabolite is a fungal toxin or a biosynthetic intermediate thereof. A “fungal toxin” is a compound that causes a pathological condition in a host, either plant or animal. Fungal toxins could be mycotoxins present in food products, toxins produced by phytopathogens, toxins from poisonous mushrooms, or toxins produced by zoopathogens. Preferred fungal toxins include, without limitation, aflatoxins, patulin, zearalenone, cytochalasin, griseofulvin, ergochrome, cercosporin, marticin, xanthocillin, coumarins, tricothecenes, fusidanes, sesterpenes, amatoxins, malformin A, phallotoxins, pentoxin, HC toxin, psilocybin, bufotenine, lysergic acid, sporodesmin, pulcheriminic acid, sordarins, fumonisins, ochratoxin A, and fusaric acid.

[0256] In certain embodiments of the methods of the invention, the secondary metabolite is a modulator of cell surface receptor signaling or a biosynthetic intermediate thereof. Modulators of cell surface receptor signaling might function by one of several mechanisms including, without limitation, acting as agonists or antagonists, sequestering a molecule that interacts with a receptor such as a ligand, or stabilizing the interaction of a receptor and molecule with which it interacts. Preferred modulators of cell surface signaling include, without limitation, the insulin receptor agonist L-783,281 and the cholecystokinin receptor antagonist asperlicin.

[0257] In certain embodiments of the methods of the invention, the secondary metabolite is a plant growth regulator or a biosynthetic intermediate thereof. A “plant growth regulator” is a molecule that controls growth and development of a plant by affecting processes that include, without limitation, division, elongation, and differentiation of cells. Preferred plant growth regulators include, without limitation, cytokinin, auxin, gibberellin, abscisic acid, and ethylene.

[0258] In certain embodiments of the methods of the invention, the secondary metabolite is a pigment or a biosynthetic intermediate thereof. A “pigment” is a substance that imparts a characteristic color. Preferred pigments include, without limitation, melanins and carotenoids.

[0259] In certain embodiments of the methods of the invention, the secondary metabolite is an insecticide or a biosynthetic intermediate thereof. An “insecticide” is a molecule that is toxic to insects. Preferred insecticides include, without limitation, nodulisporic acid.

[0260] In certain embodiments of the methods of the invention, the secondary metabolite is an anti-neoplastic compound or a biosynthetic intermediate thereof. An “anti-neoplastic” compound is a molecule that prevents or reduces tumor formation. Preferred anti-neoplastic compounds include, without limitation, taxol (paclitaxel) and related taxoids.

### EXAMPLE 1

Preparation of Clones Expressing Regulators of Secondary Metabolite Production

[0261] To prepare clones that can be used to genetically modulate the expression of genes involved in secondary metabolism, the following experiments were conducted.

[0262] The Gateway (Life Technologies, Inc.) Cloning Technology (U.S. Pat. No. 5,888,732) was used o generate constructs for expression of fungal regulators. The polymerase chain reaction (PCR) was used to amplify cDNA or genomic DNA containing coding sequence for fungal regulators; the resultant PCR products contain common sites at both 5′ and 3′ ends in order to facilitate recombination into the Gateway entry vector MB971 (Life Technologies Inc.). The resultant entry clones were then reacted in a Gateway destination cocktail with plasmid MB1419 (or related destination vectors). MB1419 is derived from pLXZ161. pLXZ161 is a gene vector derived from pBC-phleo (P. Silar, Fungal Genetics Newsletter 42: 73 (1995)) that carries a phleomycin resistance cassette for selection of transformants, as well as a polylinker located between the Aspergillus nidulans PGK promoter and the A. nidulans trpC terminator. pLXZ161 was constructed as follows: First, the Aspergillus nidulans trpC terminator was amplified from A. nidulans genomic DNA by PCR using Turbo Pfu Polymerase as described by the manufacturer (Stratagene, 11011 North Torrey Pines Road, La Jolla, Calif. 92037). Primers used in the reaction are TRPC-1 5′-GCGGCCGCGGCGCCCGGCCCATGTCAACAAGAAT-3′) and TRPC-2 5′-CCGCGGCCGAGTGGAGATGTGGAGT-3′. The resultant product was digested with the restriction enzymes SacII and NotI, purified by agarose gel electrophoresis, and cloned into SacII/NotI-digested pBC-phleo DNA, to generate pLXZ116. Second, the A. nidulans promoter was amplified from A. nidulans genomic DNA by PCR using primers PGK1-1 5′CATGGGGCCCCGTGATGTCTACCTGCCCAC-3′ and PGK1-1 5′-CATGATCGATTGTGGGTAGTTAATGGTATG-3′, Turbo Pfu Polymerase, and reaction conditions as described above. The resultant product was digested with ApaI and ClaI and cloned into ApaI/ClaI-digested pLXZ116, to generate pLXZ161. To produce MB1419, the ccdB (death gene) cassette from pEZC7201 (Life Technologies, Gateway cloning manual) was amplified by PCR using oligos MO511 (GGCCATCGATACAAGTTTGTACAAAAAAGCTGAAC) and MO512 (GCGGCCGCACCACTTTGTACAAGAAAGC), digested with ClaI and NotI, and cloned into NotI/ClaI-digested pLXZ161. This generated a destination vector in which the death gene cassette resides between the A. nidulans PGK promoter and the A. nidulans trpC Terminator of pLXZ161. Thus, destination reactions using this vector allow configuration of any gene in an entry clone to be expressed under the control of the A. nidulans PGK promoter. The fungal selectable marker contained on this plasmid is ble, which confers resistance to phleomycin.

### EXAMPLE 2

Transformation of Aspergillus terreus and Penicillium chrysogenum

[0263] Destination clones were transformed into either Aspergillus terreus or Penicillium chrysogenum. In order to transform these fungi, spores were first generated by culture of strain ATTCC#20542 (A. terreus), MF1 (NRRL1951, P. chrysogenum), or MF20 (ATCC#11702, P. chrysogenum) on petri plates containing potato dextrose agar (Difco BRL) at 30° C. for 3-6 days. Spores were removed from PDA either by resuspension in sterile water or Tween-80 (0.1%) or by scraping directly from the plate using a sterile spatula. Yeast extract sucrose medium, or YES (2% Yeast Extract, 6% Sucrose), was inoculated to a density of 1-5×10⁶ spores per ml and incubated with shaking in an Erlenmeyer flask at 26-30° C. for 12-16 hr (250 rpm). Mycelia were harvested by centrifugation at 3200 rpm for 10 minutes, and washed in sterile water two times. Mycelia were resuspended in a filter sterilized solution of Novozyme 234 (Sigma) at 2-5 mg/ml in 1 M MgSO₄ and digested at room temperature with shaking (80 rpm) for 1-2 hr. Undigested material was removed by filtration through Miracloth (Calbiochem, 10394 Pacific Center Court, San Diego, Calif. 92121). After adding 1-2 volumes of STC (0.8 M sorbitol, 25 mm Tris, pH 7.5, and 25 mM CaCl₂), the protoplasts were pelleted by centrifugation at 2500 rpm. Protoplasts were washed 2 times in STC by centrifugation. Resulting protoplasts were resuspended to a density of 5×10⁷ per ml in a solution of STC, SPTC (40% polyethylene glycol in STC) and DMSO in a ratio of 9:1:0.1 and frozen at −80° C. For transformations, two aliquots (100 μl each) of protoplasts were mixed with 1-5 ug of either pBCphleo or destination clones for expression of fungal regulators; mixtures were incubated on ice for 30 min. An aliquot of SPTC (15 μl) was added to each tube and the reaction was incubated at room temperature for 15 minuts. An additional aliquot (500 μl) was added with gentle mixing, and the reaction was incubated for an additional 15 minutes at room temperature. The reaction was next resuspended in 25 ml of molten regeneration medium (Potato Dextrose Agar from Sigma, 3050 Spruce Street, St Louis, Mo. 63103) with 0.8 M sucrose, maintained at 50° C., and poured onto a 150 mm petri plate containing 25 ml of solidified regeneration medium plus phleomycin (60-200 μg/ml for A. terreus and 30 μg/ml for P. chrysogenum). Transformants are typically visible after 2-5 days of incubation at 26-30° C.

[0264] Phleomycin resistant colonies were colony purified into small 24 well plates and then examined both on plates and in shake flask cultures. Morphological and developmental effects of the transgene were observed under both growth conditions. Due to the heterogeneous nature of transformation in filamentous fungi, at least 10 (and often many more) phleomycin resistant colonies were pursued. Detailed examination of a subset of phleomycin resistant colonies suggests that approximately 80% of the colonies contain a transgene.

### EXAMPLE 3

Determination of Lovastatin Production

[0265] Lovastatin assays were performed using broths from shake flask cultures of A. terreus. A. terreus transformants were grown on modified RPM medium (WO/37629) containing 4% glucose, 0.3% corn steep liquor (Sigma), 0.2% KNO₃, 0.3% KH₂PO₄, 0.05% MgSO₄.7H₂O, 0.05% NaCl, 0.05% polyglycol (Dow), 0.1% trace elements (14.3 g/l ZnSO₄.7H₂O, 2.5 g/l CuSO₄.5H₂O, 0.5 g/l NiCl₂.6H₂O, 13.8 g/l FeSO₄.7H₂O, 8.5 g/l MnSO₄.H₂O, 3 g/l citric acid. H₂O (add first), 1 g/l H₃BO₃, 1 g/l Na₂MoO₄, 2.5 μl CoCl₂.6H₂O). The final pH was adjusted to 6.5. Spores for inoculation were generated by culturing on plates containing minimal medium plus phleomycin for 1 week at 27° C. Spores for shake flask inoculation were removed from plates by dragging the tip of a sterile wooden stick approximately 1 inch across the plate surface. The tip of the stick was then dipped into the shake flask medium and swirled gently. Cultures were grown at 27° C., 225 RPM for 5-6 days.

[0266] Quantitative assays were performed to assess the levels of lovastatin in broths from shake flask cultures. To assay lovastatin production, (His)₆HMGCoA reductase was first expressed in Saccharomyces cerevisiae and purified with a nickel column. A. terreus samples were fermented as described above and 0.5 mL samples were taken at day 5-6, put in a 1 mL 96-well plate, and centrifuged to remove mycelia before assaying. Samples were transferred to another 1 mL 96-well plate and frozen at −80° C.

[0267] Samples were thawed and 10 μL removed and diluted 1:50 in H₂O. 10 μL of this diluted broth was assayed in a reaction (200 μL total) containing 1 mM L-HMGCoA, 1 mM NADPH, 0.005 mM DTT and 5 μL (His)₆HMGCoA reductase. The disappearance of absorbance at 340 nm was observed over time, and this represents the utilization of NADPH, an electron donor required for the reduction of HMGCoA. Lovastatin inhibits HMGCoA reductase, and thus assays containing lovastatin display a decreased rate of disappearance of absorbance at 340 nm. The initial velocities for NADPH disappearance were calculated for broth-containing samples and reactions containing lovastatin standards. Velocities were then adjusted for dilution, and regression analysis was used to determine metabolite concentration.

[0268] Several fungal regulators were found to improve the overall yield of lovastatin in shake flask cultures. It is possible that these regulators will also increase productivity. Lovastatin production levels from strains containing regulators were compared to either levels from strains containing control vector or a non-transformed strain. Data points were collected for at least 10 phleomycin resistant colonies, and the production levels for each sample set was displayed as a box plot (e.g., FIG. 3). In box plot portrayals of the data, the box represents the central 50% of the data, and the line within the box represents the median value for the entire data set; outlying data points are flagged. Box plot portrayals assist in determining whether a particular sample set is significantly different from a set collected from a control strain.

[0269] Hutchinson et al., PCT Publication WO 00/37629, has demonstrated that overexpression of lovE increases lovastatin production in Aspergillus terreus; thus, lovE expressing strains served as positive controls in these experiments. The data in FIG. 3 is organized in sets of three; samples expressing a particular regulator are always compared to control samples (both positive and negative) grown and assayed at the same time. The results in FIG. 3 indicate that several fungal regulators appreciably stimulate production of lovastatin. Table 1 summarizes the results of these studies showing representative fungal regulators that improved the yield of lovastatin in shake flask cultures.

TABLE 1
Representative fungal regulators that increase
lovastatin production in A. terreus

| Plasmid | Regulator |
|---|---|
| MB1423 | pacC (DNA-binding domain (DBD))-VP16 (transcription |
| | activation domain (TAD)) |
| MB1695 | VP16 (TAD)-pacC (DBD) |
| MB1564 | VP16 (TAD)-pacCL266 |
| MB2415 | amdAG229D (TAD)-pacCL266 |
| MB2417 | amdAG229C (TAD)-pacCL266 |
| MB2418 | amdAG229D (TAD)-pacC (DBD) |
| MB2419 | amdAG229D (TAD)-pacC (DBD) |
| MB2203 | VP16 (TAD)-RfeC (An09) |
| MB1316 | lovE |
| MB2244 | VP16 (TAD)-Pc23 |
| MB1970 | At18 |
| MB1310 | creA |

### EXAMPLE 4

Determination of Penicillin Production

[0270] Penicillin assays were performed using broths from shake flask cultures of P. chrysogenum. To test levels of penicillin produced in P. chrysogenum transformants, a plug containing spores and mycelia was used as the inoculum. The published P2 production medium (J Lein (1986) in Overproduction of microbial metabolites (Z. Vanek and Z. Hostalek eds.) pp. 105-139), which contains, 30% lactose, 5× pharmamedia cotton seed flour, ammonium sulfate, calcium carbonate, potassium phosphate, potassium sulfate, and phenoxyacetic acid pH 7, was used. Flasks were incubated at 26° C. with shaking at 225 rpm, and sampling was done after 6 days of growth.

[0271] To monitor penicillin production, 1-1.5 mls of broth was placed into 96-well plates. The fermentation broth was clarified by centrifugation for 10 min at 4000 g. Supernatants were transferred to a new 96-well plate. Standard samples containing 0, 25, 50, 100, 200, 300, 400, 500 μg/mL phenoxymethylpenicillin (sodium salt) were dissolved in 10 mM potassium phosphate (pH 7.0). For penicillin assays 40 μL of clarified fermentation broth and penicillin standard solutions were transferred to a 96-well UV, collection plate. 200 μL of imidazole reagent was placed in a 96-well filter plate (0.45 micron). The imidazole reagent was prepared by dissolving 8.25 g of imidazole in 60 mL of water, adding 10 mL of 5 M HCl and then adding 10 mL of mercuric chloride solution (0.27 g dissolved in 100 mL of water). The pH of the imidazole reagent was adjusted to 6.80+/−0.05 with 5 M HCl and then diluted to 100 mL with water (see e.g., Bundgaard, H. and K. Ilver, Journal of Pharm Pharmac 24: 790-794 (1972)). The derivatization reaction of penicillin was initiated by vacuum filtration of imidazole reagent into a collection plate containing the aliquoted samples and standards. The collection plate was placed into the 96-well plate reader at 45° C., and an increase at 325 nm was monitored over 20 minutes. A Molecular Devices 96-well UV/is plate reader was used for all spectrophotometric detection.

[0272] Several fungal regulators were found to improve the yield of penicillin in shake flask cultures. These experiments were performed in both MFL1951), an early strain in the penicillin development series, and MF20 (ATCC#11702(, a strain of Penicillium chrysogenum that produces approximately ten-fold more penicillin than MF1. As described above for lovastatin, large numbers of phleomycin resistant colonies were used in shake flask experiments, such that analysis could be performed to determine whether the effect of a particular regulator was statistically significant. Strains of MF20 expressing pacCL266 (MB1563), an alkalinity mimicking allege of pacC, displayed increased penicillin production. pacC (DBD)-WP16 (TAD) (e.g., MB1423) stimulated penicillin production in MF1. In addition, both shake flask and small-scale bioreactor studies demonstrate that this regulator can improve the productivity of Penicillium strains; strains expressing pacC (DBD)-WP16 (TAD) initiate production and reach maximum production levels earlier than the parent MF1 strain or a strain transformed with a control vector. Regulators from fungi other than Penicillium chrysogenum also were found to improve penicillin production. Both MF1 and MF20 strains that expressed lovU (MB1317), a gene from Aspergillus terreus, displayed increased yields of penicillin production. Penicillin yields were also improved in MF20 strains that expressed YHR056c, a gene from Saccharomyces cerevisiae.

[0273] These results demonstrate that many fungal regulator genes are capable of improving penicillin productions, including genes from unrelated species.

### EXAMPLE 5

Alteration of Fungal Morphology

[0274] Fungal morphology can be altered to be favorable to a particular fermentation. Several fungal regulators were found to alter morphological or developmental characteristics of Penicillium strains. Specifically, pacC (DBD)-VP16 (TAD) and VP16 (TAD)-areA (form P. chrysogenum) caused hyphae to aggregate in shake flask cultures. Pellet size is often a crucial factor during growth in bioreactors. Pellet size can impact variables during growth such as the amount of energy needed to drive the impellers within the bioreactor. Aggregating cultures can be beneficial for purification of biomass from culture broth during post-fermentation processing. In addition to these morphological effects, expression of pacC (DBD)-VP16 (TAD), VP16 (TAD)-areA, and VP16-At32 affected the developmental process of sporulation. Strains expressing of pacC (DBD)-VP16 (TAD), VP16(TAD)-areA, At32 (from A. terreus), and VP16-At32 are sporulation defective, whereas strains expressing At32 sporulate in submerged culture. In some instances (e.g., sterigmatocystin biosynthesis in A. nidulans) sporulation and production of secondary metabolites are coordinately regulated. In other examples, such as penicillin production, sporulation defective strains often produce increased levels of metabolite. Therefore, regulators that increase or decrease sporulation may provide a tool to adjust the developmental state of the fungus to the optimal state for production of any particular metabolite

### EXAMPLE 6

Increasing Resistance to the Toxic Effects of a Secondary Metabolite as a Means to Improve Secondary Metabolite Production Including Overexpression of PUMP1 and PUMP2 to Increase Resistance to the Toxic Effects of Lovastatin

[0275] Growth of a fungus that produces secondary metabolites can be limited, in part, by the toxic effects of the secondary metabolites themselves. In the absence of resistance mechanisms to protect fungi from toxic effects of these metabolites, decreased yields of the metabolite can be observed. For example, Alexander et al (Mol. Gen. Genet. 261: 977-84 (1999)) have shown that the trichothecene efflux pump of Fusarium sporotrichiodes, encoded by the gene TRI12, is required both for high level production of, and resistance to the toxic effects of, trichothecenes produced by this fungus. Thus, modifications that increase the resistance of a fungus to a toxic secondary metabolite that it produces can increase the saturation density and extend the metabolically active lifetime of the producing fungus. In a bioreactor, such attributes will have the beneficial effect of increasing yield and productivity of a metabolite. Regulators of secondary metabolite production whose expression can be modulated to increase resistance of a fungus to toxic metabolites that it produces can include, without limitation, transporters that promote efflux of the metabolite from cells, enzymes that alter the chemical structure of the metabolite within cells to render it non-toxic, target(s) of the metabolite that mediate its toxicity, and gene products that alter cellular processes to counteract the toxic effects of a metabolite. Additional benefits of increasing efflux of secondary metabolites include increasing the amount of metabolite available for purification from the fermentation broth and mitigation of feedback inhibition of secondary metabolism that may be mediated by the metabolite itself. Indeed, feedback inhibition of a biosynthetic pathway by a product of that pathway is well documented in many microorganisms, and this inhibition can act at the transcriptional, translational, and post-translational levels. Several well-documented examples in yeast include the transcriptional repression of lysine biosynthetic genes by lysine (Feller et al., Eur. J. Biochem. 261: 163-70 (1999)), the decreased stability of both the mRNA encoding the uracil permease Fur4p and the permease itself in the presence of uracil (Seron et al., J. Bacteriol. 181: 1793-800 (1999)), and the inhibition of alpha-isopropyl malate synthase, a key step in leucine biosynthesis, by the presence of leucine (Beltzer et al., J. Biol. Chem. 263: 368-74 (1988)).

[0276] Transporters that could mediate resistance to secondary metabolites include members of the major facilitator superfamily (MFS) and the ATP binding cassette (ABC) transporters. For example, overexpression of the class I MFS-type transporter Flr1p in S. cerevisiae has been shown to confer resistance to a variety of toxic compounds such as cycloheximide, fluconazole, 4-nitroquinolone oxide, and cerulenin (Alarco et al., J. Biol. Chem. 272: 19304-13 (1997); Oskouian and Saba, Mol. Gen. Genet. 261: 346-53 (1999)). MFS transporters have been functionally grouped into 23 families in yeast, several of which contain members known or suspected to mediate resistance to toxic compounds by promoting their efflux from the cell (reviewed by Nelissen et al. in FEMS Microbiol. Rev. 21: 113-34 (1997)). Likewise, ABC transporters encoded by genes including PDR5 from S. cerevisiae (Boyum and Guidotti, Biochem. Biophys. Res. Commun. 230: 22-6 (1997)), PMR1 from Penicillium digitatum (Nakuane et al., Appl. Environ. Microbiol. 64: 3983-8 (1998)) and MDR1 from Candida albicans (Sanglard et al., Antimicrob. Agents Chemother. 39: 2378-86 (1995)), amongst others, have been shown to confer resistance to a variety of toxic compounds when their expression is increased. A complete cataloging of ABC transporters in yeast, as well as predicted function based on sequence similarities to transporters of known function, is described in (Decottignies and Goffeau, Nat. Genet. 15: 137-45 (1997)).

[0277] Transcription factors that regulate the expression of efflux pumps could also be used to increase efflux of a drug from a fungal cell to increase yields of a metabolite and decrease toxicity of the secondary metabolite in a fermentation. Such transcription factors include, but are not limited to, genes such as YAP1, PDR1, and PDR3 from S. cerevisiae and their homologs. Overexpression of each of these genes has been shown to upregulate expression of transporters and cause increased resistance of S. cerevisiae to toxic compounds (for examples, see Reid et al., J. Biol. Chem. 272: 12091-9 (1997); Katzmann et al., Mol. Cell. Biol. 14: 4653-61 (1994); Wendler et al., J. Biol. Chem. 272: 27091-8 (1997)).

[0278] Resistance to the toxic effects of secondary metabolites mediated through modulating expression of target genes will vary with metabolite. For example, amatoxins kill cells by inhibiting the function of the major cellular RNA polymerase, RNA polymerase II, in eucaryotic cells. Mutant forms of RNA polymerase II resistant to the effects of alpha-amanitin have been described (Bartolomei et al., Mol. Cell. Biol. 8: 330-9 (1988); Chen et al., Mol. Cell. Biol. 13: 4214-22 (1993)). Similarly, mutations affecting HMG CoA reductase, the target enzyme for the secondary metabolite lovastatin, have been identified. Increased levels of HMG CoA Reductase can also cause resistance to lovastatin (Ravid et al., J. Biol. Chem. 274: 29341-51 (1999); Lum et al., Yeast 12: 1107-24 (1996)). Taxol (paclitaxel), causes lethality by increasing microtubule stability, thus preventing exit from mitosis. Dominant mutations affecting β-tubulin that confer resistance to taxol have been characterized (for example, see Gonzalez et al., J. Biol. Chem. 274: 23875-82 (1999)) and could prove to be useful to confer resistance of production strains to this toxic metabolite. Such mutatations appear to decrease the stability of microtubules; whether these mutations affect the binding of taxol to microtubules is not known. Similarly, modulating expression of other genes that decrease the stability of microtubules could also confer taxol resistance to a fungus that produces taxol. The pneumocandin and echinocandin families of metabolites are fungal secondary metabolites that inhibit the enzyme 1,3-β-D-glucan synthase. Dominant mutations in the Candida albicans glucan synthase gene, FKS1, have been shown to confer resistance to candins (Douglas et al., Antimicrob. Agents Chemother. 41: 2471-9 (1997)). Glucan synthase mutations such as these could be used to generate fungal production strains with increased resistance to the candin class of antifungals. S. cerevisiae mutants resistant to the growth-inhibitory effects of the fungal secondary metabolite cyclosporin A have also been described (Cardenas et al., EMBO J. 14: 2772-83 (1995)). These mutants were shown to harbor mutations in CNA1, the gene encoding the catalytic subunit of the heterodimeric calcium-calmodulin dependent phosphatase, calcineurin A. Fumagillin, an antiangiogenic agent, binds to and inhibits the N-terminal aminopeptidases in a wide variety of both procaryotes and eucaryotes (Sin et al., Proc. Natl. Acad. Sci. USA 94: 6099-103 (1997), Lowther et al., Proc. Natl. Acad. Sci. USA 95: 12153-7 (1998)). Mutations in this enzyme that block fumagillin binding and/or inhibitory activity could well prove useful in enhancing the resistance of fungal production strains to the growth inhibitory effects of this secondary metabolite.

[0279] To demonstrate the feasibility of engineering a fungal strain to be resistant to otherwise toxic amounts of a secondary metabolite, two genes from the lovastatin biosynthetic cluster of A. terreus strain ATCC 20542 were used (Kennedy et al., Science. 284: 1368-72 (1999)). These genes are predicted to encode proteins, denoted by Genbank accession numbers AAD34558 (hereafter referred to as PUMP1) and AAD34564 (hereby referred to as PUMP2), that are members of the MFS class of transporters. As described above, some MFS transporters are known to confer resistance to toxic compounds. PUMP1 and PUMP2 were tested for their ability to confer resistance to otherwise toxic levels of lovastatin when expressed in the fungus S. cerevisiae.

[0280] Aspergillus terreus (MF22; ATCC20542) was grown for 45 hours in Production Media at 25° C. (Production Media contains Cerelose, 4.5% (w/v) Peptonized Milk, 2.5% (w/v) Autolyzed yeast, 0.25% (w/v) Polyglycol P2000, 0.25% (w/v) pH to 7.0). Mycelia were harvested in a 50 cc syringe plugged with sterile cotton wool using a vacuum apparatus, washed once with sterile H₂O, and snap frozen in liquid nitrogen. Mycelia were then ground to a powder under liquid nitrogen in a mortar and pestle, and homogenized in RLC buffer (Qiagen RNeasy Kit; Qiagen Inc., 28159 Avenue Stanford, Valencia Calif. 93155) using a GLH rotor-stator homogenizer (Omni International, 6530 Commerce Ct., Suite 100, Warrenton, Va. 20817.) Total RNA was purified using a RNeasy Maxi column according to the instructions of the manufacturer.

[0281] The polyA+ fraction of the A. terreus total RNA was isolated using Oligotex beads (Qiagen Inc.). Purified polyA+ RNA (5 μg) was used to generate complementary DNA (cDNA) using Superscript Reverse Transcriptase (Gibco BRL, 9800 Medical Center Drive, PO Box 6482, Rockville, Md. 20849) according to the instructions of the manufacturer. The cDNA was then used to isolate and clone PUMP1 and PUMP2 gene sequences using the polymerase chain reaction (PCR) and Gateway (Life Technologies) Cloning Technology (U.S. Pat. No. 5,888,732). Oligonucleotide sequences used for PCR were 5′-ACAAAAAAGCAGGCTCCACAATGACATCCCACCACGGTGA-3′ (SEQ ID NO: 7) and 5′-ACAAGAAAGCTGGGTTCATTCGCTCCGTCCTTTCT-3′ (SEQ ID NO: 8) for PUMP1. Oligonucleotide sequences used for PUMP2 PCR were 5′-ACAAAAAAGCAGGCTCCACAATGGGCCGCGGTGACACTGA-3′ (SEQ ID NO: 9) and 5′-ACAAGAAAGCTGGGTCTATTGGGTAGGCAGGTTGA-3′ (SEQ ID NO: 10). The resultant plasmids, MB1333 and MB1334, were designed to express PUMP1 and PUMP2, respectively, under control of the S. cerevisiae TEF1 promoter. The plasmids carry a functional URA3 gene to allow for selection of the plasmid on media lacking uracil in a ura3 mutant strain. These plasmids also contained a 2-micron origin for high-copy replication in yeast. Control plasmids were as follows: MB969, the parent vector for MB1333 and MB1334, that does not contain a heterologous gene and is not expected to confer resistance to a yeast strain; MB1344, constructed and described in Donald et al., Appl. Environ. Microbiol. 63: 3341-4 (1997) as pRH127-3, that expresses a soluble form of HMG CoA reductase under control of the yeast GPD1 promoter and is known to confer resistance to increased levels of lovastatin (Donald et al., Appl. Environ. Microbiol. 63: 3341-4 (1997)).

[0282] MB1333, MB1334, MB969 and MB1344 were transformed into the yeast strain 22409 (Research Genetics, USA) using standard transformation methods for S. cerevisiae (Biotechniques, 1992, 13(1): 18). Strain 22409 is derived from the S288c strain background of S. cerevisiae, and its complete genotype is as follows: MATa/α, his3Δ1/his3Δ1, leu2Δ0/leu2Δ0, ura3Δ0/ura3Δ0, LYS2/lys2Δ0, MET15/met15Δ0 pdr5::G418/PDR5. Transformants were grown overnight at 30° C. in synthetic complete media lacking uracil (SC-U) to maintain selection for the plasmid. Cultures were diluted 1:10 in sterile water, and 5 μl of each strain was spotted to SC-URA agar containing different concentrations of lovastatin as shown in FIG. 1. Strikingly, the strain harboring MB1333, and thus expressing PUMP1, shows resistance to lovastatin equivalent to the positive control strain in which the soluble fragment of HMG CoA reductase is overexpressed (strain carrying MB1344). These strains show no obvious growth inhibition even at the highest concentrations of lovastatin tested (150 μg/ml). In contrast, the vector-only control and the strain expressing PUMP2 show growth inhibition at the lowest concentration of lovastatin tested (50 μg/mL). Thus, these data indicate that PUMP1 is an excellent candidate for use in engineering lovastatin producing strains to enhance resistance to lovastatin and to promote efflux of this secondary metabolite.

### EXAMPLE 7

Altering Strain Characteristics to Improve Secondary Metabolite Production Including Causing Conditional Lysis

[0283] Methods for improving the production of secondary metabolites can involve the construction of strains with desired characteristics for growth or recovery of secondary metabolites. Optimal strain characteristics likely will vary depending upon the fungus being utilized, the particular secondary metabolite being produced, and the specifications of an individual fermentation apparatus. Two traits that might be advantageous for maximal production of secondary metabolites are strains that can be lysed under specific conditions and strains that have morphological characteristics such as increased surface area of active growth and decreased hyphal length. Described below are examples of how both of these traits can be affected by modulating the activity of small GTP-binding proteins (G-proteins).

[0284] Fungi must respond to adverse external signals such as osmotic stress. Media for production of secondary metabolites often are hypo-osmotic, whereas fungi that exist on desiccated surfaces must respond to hyper-osmotic stress. One response to hyper-osmotic conditions is to increase the intracellular concentration of osmolytes such as glycerol. During hypo-osmotic stress the integrity of a fungal cell can be maintained both by decreasing intracellular osmolyte concentrations as well as by cell wall modifications. In Saccharomyces cerevisiae the PKC1-SLT2 signaling pathway is required for growth in conditions of low osmolarity (reviewed in Heinisch et al., Mol. Microbiol. 32: 671-680 (1999)). PKC1, which encodes yeast protein kinase C, is activated by components such as the small GTP-binding protein Rho1. Pkc1 then transduces this signal to a MAP kinase signaling cascade that includes the MEK kinase Bck1, the functionally redundant MEKs Mkk1 and Mkk2, and the MAP kinase Slt2. Mutations in genes encoding these signaling components result in varying degrees of cell lysis on media of low osmolarity. Genetic screens have identified many other proteins that function either upstream of PKC1-SLT2 signaling or regulate specific pathway components. These factors include Ppz1, Ppz2, Pph21, Pph22, Ptp2, Ptp3, Isr1, Rom1, Rom2, Mid2, Slg1, Wsc2, Wsc3, Wsc4, Stt3, Stt4, and Vps45; many of these components have homologs in other fungi. In addition, transcription factors, such as Rlm1, Swi4, and Swi6, that can function downstream of PKC1-SLT2 signaling have been identified, and it has been demonstrated that some of these factors are required for the proper expression of genes involved in cell wall biosynthesis. Thus, many components that can modulate the structural integrity of yeast cells have been identified. It is possible that manipulation of these factors could be performed, such that conditional expression of variants of these genes (or the homologs from filamentous fungi) would result in the lysis of fungi and maximal recovery of secondary metabolites.

[0285] Conditional lysis of fungi at the conclusion of a fermentor run would be a powerful method for promoting increased recovery of secondary metabolite. Preferably, conditional lysis would require a simple manipulation such as a change in a standard growth parameter (e.g. temperature, dissolved oxygen) or addition of an inexpensive solute. Examples of small molecules that may cause cell lysis include the protein kinase C inhibitor staurosporine, caffeine, dyes that bind the cell wall polymer chitin (e.g. calcofluor white, Congo red), inhibitors of glucan synthase (e.g. candins), and inhibitors of chitin synthase. The cost of using these molecules in a large-scale fermentor likely would be prohibitive. Similarly, addition of enzymes such as glucanases or chitinases would likely be an effective, but costly, method for inducing lysis. An alternative means to induce lysis would be the conditional expression of a dominant negative mutation in a gene encoding a component required for cell wall integrity. Since many components of the PKC1-SLT2 signaling pathway are widely conserved, it is possible that the conditional expression of a dominant inhibitory form of a member of this pathway would facilitate lysis in a variety of fungi, including those fungi that produce secondary metabolites such as lovastatin and cyclosporin A.

[0286] The G-protein Rho1 functions to regulate cell wall integrity by at least two independent mechanisms; Rho1 activates Pkc1 signaling as well as 1,3-beta-glucan synthase activity (Nonaka et al., EMBO J. 14: 5931-5938 (1995); Drgonova et al., Science 272: 277-279 (1996); Qadota et al., Science 272: 279-281 (1996)). In addition, dominant inhibitory forms of Rho1 have been identified. Expression of a rho1G22S D125N mutant form in a wild-type Saccharomyces cerevisiae strain results in cell lysis. Therefore, the conditional expression of dominant inhibitory forms of Rho1 under the control of a heat-shock inducible promoter might be an effective method for causing cell lysis in production fungi.

[0287] RHO1 coding sequence for construction of dominant mutations can be isolated from Saccharomyces cerevisiae genomic DNA. Primers 5′-cgcGGATCCCGACATATTCGAGGTTGACT-3′ (SEQ ID NO: 11) and 5′-cccAAGCTTGCTAGAAATATGAACCTTCC-3′ (SEQ ID NO: 12) are used to amplify RHO1 coding sequence with 1 kilobase of upstream regulatory sequence and 500 basepairs of downstream regulatory sequence. BamHI and HindIII restriction sites are added to the oligonucleotides to facilitate cloning into the pRS416 centromere-based yeast vector. The Quik Change Site-Directed Mutagenesis Kit (Stratagene, La Jolla Calif.) is used to first create a mutation that encodes the G22S substitution; next, the pRS416rho1G22S plasmid is used as a template to introduce a mutation that encodes the D125N substitution. Primer pair 5′-gtgcctgtAgtaagacatgt-3′/5′-acatgtcttacTacaggcac-3′ is used to anneal to the pRS416RHO1 template for pRS416rho1G22S allele construction. Primer pair 5′-gtaaagtgAatttgagaaac-3′/5′-gtttctcaaatTcactttac-3′ is used to anneal to the pRS416rho1G22S template for pRS416rho1G22S D125N allele construction. pRS416rho1G22S D125N and control plasmids (pRS416RHO1 and pRS416) are then used to transform a wild-type ura3 auxotrophic strain. Transformants are selected and grown at 25° C. in synthetic liquid growth medium lacking uracil and containing the osmolyte sorbitol (1M). Cultures are then transferred to growth in synthetic liquid growth medium lacking uracil without sorbitol, and cells are visually inspected following growth for various periods of time. Expression of the rho1G22S D125N dominant allele causes cell lysis after growth for approximately 120 minutes.

[0288] Conditional promoters can be used to express RHO1 dominant mutations in filamentous fungi. The Aspergillus niger tpsB gene is expressed at low levels during growth at ambient temperatures, whereas expression is strongly enhanced upon heat-shock at 40° C.; tpsB regulatory sequence contains multiple copies of the CCCCT stress responsive element (Wolschek et al., J. Biol. Chem. 272: 2729-2735 (1997)). Primers 5′-catgGGGCCCTCTCTCCACCGGCACTAAGATAGC-3′ (SEQ ID NO: 13) and 5′-cgcGGATCCagCATTGGAAAAGGAGGGGGGGGAAG-3′ (SEQ ID NO: 14) are used to amplify 490 basepairs of tpsB upstream regulatory sequence from A. niger genomic DNA. This PCR product contains the tpsB start codon followed by a BamHI cloning site. The tpsB upstream regulatory sequence can be cloned as an ApaI/BamHI fragment into the filamentous fungal vector pLXZ116 (see Example 1). The tpsB promoter is cloned into a multiple cloning site that also contains terminator sequence of the A. nidulans trpC gene. Primers 5′-cgcGGATCCaTCACAACAAGTTGGTAACAGTATC-3′ (SEQ ID NO: 15) and 5′-ggACTAGTTAACAAGACACACTTCTTCTTCTT-3′ (SEQ ID NO: 16) are used to amplify rho1G22SD125N coding sequence, and the product is cloned into the BamHI/SpeI sites of the tpsB containing filamentous fungal vector. This vector can be used to conditionally express (at 40° C.) a dominant negative form of Rho1 that can cause cell lysis.

[0289] The filamentous fungal vector containing the tpsB promoter (no RHO1 insert) and a vector containing rho1G22S D125N are used to transform Aspergillus nidulans, Penicillium chrysogenum, and Aspergillus terreus. To assess the impact of conditional expression of a RHO1 dominant negative mutation on cell wall integrity of filamentous fungi, mycelia or spore preps are made from 10 independent transformants, and mycelia or spores are used to inoculate both liquid shake flask cultures and plates containing minimal or rich medium. After growth for 1-2 days the strains are transferred to both 37° C. and 40° C. Strains are examined for morphological defects over the next 24 hours of incubation; potential morphological defects include abnormalities in polarized growth, hyphal wall integrity, and conidiophore development. The optimal time of heat-shock induction required for lysis will be determined. Furthermore, it will be determined whether any abnormalities can be suppressed by growth on medium containing osmotic stabilizers such as sorbitol (1.2 M), sucrose (1 M), or NaCl (1.5 M).

[0290] Transformants of Aspergillus terreus that display morphological abnormalities are used to assess whether conditional lysis of strains can be a tool for recovering larger quantities of lovastatin from fermentation broths. Five independent RHO1-containing transformants that display lysis defects will be processed as the A. terreus transformants described in earlier examples. Cultures from each transformant and control strains will be grown for either 8, 9, 10, 11, or 12 days, and cultures will then be incubated at the optimal temperature and for the optimal time required for cell lysis. Following heat shock the cell mass from each culture is separated from the broth by filtration, and the cell mass is lyophilized and weighed. Lovastatin concentration in the broth is calculated as described in earlier examples.

[0291] Morphological characteristics such as decreased hyphal length might be advantageous during production of secondary metabolites. For example, strains with shorter filament lengths should display decreased entanglement, floc formation, and shear stress. Such strains would be less susceptible to shear stress damage, these strains might reduce viscosity and facilitate mass transfer, and short filament strains might save energy costs required to power impellers. Increasing the amount of hyphal branching should result in an overall decrease in filament length. The following example describes how expression of a dominant inactive form of the Saccharomyces cerevisiae Rsr1 protein (also known as Bud1) results in increased lateral branch formation.

[0292] The yeast Rsr1 protein is required for proper bud site selection; strains lacking Rsr1 bud at random sites on the cell surface. Dominant negative mutations such as rsr1K16N have been identified, and expression of these mutant forms cause random bud site selection without causing obvious growth defects. Expression of rsr1K16N in filamentous fungi may increase branching, decrease filament length, and not have deleterious effects on the growth of the organism.

[0293] RSR1 coding sequence for construction of dominant mutations can be isolated from Saccharomyces cerevisiae genomic DNA. Primers 5′-cgcGGATCCTATCTTCACTCAATATACTTCCTA-3′ (SEQ ID NO: 17) and 5′-cccAAGCTTCATCGTTGAAACTTGATAACGCAC-3′ (SEQ ID NO: 18) are used to amplify RHO1 coding sequence with 750 basepairs of upstream regulatory sequence and 500 basepairs of downstream regulatory sequence. BamHI and HindIII restriction sites are added to the oligonucleotides to facilitate cloning into the pRS416 centromere-based yeast vector. The Quik Change Site-Directed Mutagenesis Kit (Stratagene, La Jolla Calif.) is used to create dominant-negative RSR1 substitution mutation K16N. Primer pair 5′-tggtgtcggtaaTtcctgcttaac-3′/5′-gttaagcaggaAttaccgacacca-3′ is used to anneal to the pRS416RSR1 template for allele construction. The pRS416rsr1K16N and control pRS416 plasmids are then used to transform a haploid wild-type ura3 auxotrophic strain. Transformants are selected and grown at 30° C. in YPD liquid growth medium. Log phase cultures are fixed in 3.7% formaldehyde (vol:vol) and stained with the chitin-binding dye Calcofluor white, as described; previous sites of bud formation are marked with a chitin-rich structure called a bud scar. Fluorescent microscopy reveals that cells containing the control plasmid display clustering of bud scars at one pole of the cells, the well-characterized haploid pattern of bud site selection. Cells expressing rsr1K16N display a random pattern of bud site selection; bud scars are scattered across the surface of haploid cells. Cells expressing rsr1K16N do not display other obvious growth or morphological defects.

[0294] The Aspergillus nidulans PGK promoter can be used to express RSR1 dominant mutations in filamentous fungi. A filamentous fungal vector containing a multiple cloning site that is flanked by the PGK promoter and terminator sequence of the A. nidulans trpC gene is used. Primers 5′-cgcGGATCCGACTAATGAGAGACTATAAATTAG-3′ (SEQ ID NO: 19) and 5′-ccgCTCGAGCTATAGAATAGTGCAAGTGGAAGC-3′ (SEQ ID NO: 20) are used to amplify rsr1K16N coding sequence, and the product is cloned into the BamHI/XhoI sites of the filamentous fungal vector. This vector can be used to express a dominant negative form of Rsr1 that will affect the process of selecting sites for polarized growth.

[0295] The filamentous fungal vector containing rsr1K16N and control vector are used to transform Aspergillus nidulans, Penicillium chrysogenum, and Aspergillus terreus. To assess the impact of expression of RSR1 dominant negative mutations on lateral branch formation and filament length, mycelia and spore preps are made from 10 independent PCR-positive transformants, and mycelia and spores are used to inoculate both liquid shake flask cultures and plates containing minimal or rich medium. Strains are examined at various timepoints over a 48 hour period for morphological alterations, including altered patterns of germ tube emergence, increased lateral branching, decreased filament length, alterations in hyphal width, and changes in chitin staining pattern. Strains displaying desirable morphological changes are then tested in shake flask conditions to determine whether levels of penicillin (A. nidulans, P. chrysogenum) or lovastatin (A. terreus) production have changed significantly.

[0296] Aspergillus terreus and Penicillium chrysogenum transformants that display morphological characteristics such as decreased filament length and produce expected or greater levels of lovastatin and penicillin, respectively, are used to assess whether morphological changes can impact upon bioreactor challenges such as shear stress damage, mass transfer, and energy costs. Five independent PCR-positive RSR1-containing transformants that display morphological alterations are grown in a small-scale bioreactor, and examined for improved fermentation characteristics and/or production of secondary metabolite.

### EXAMPLE 8

Genes that Modulate Lovastatin Production

[0297] Described below are experiments showing that transcriptional regulators and Gα proteins from diverse fungi can modulate the production of lovastatin in A. terreus. To summarize, transformants expressing CreA and AreA, transcription factors that control carbon and nitrogen metabolism, respectively, showed increased lovastatin production while transformants expressing an activated variant of PacC, a regulator of response to environmental pH, displayed reduced levels of lovastatin. Gα proteins and mutant derivatives thereof that either increased or decreased lovastatin titers also were identified. The results of the experiments described in this Example are summarized in Table 2.

[0298] A collection of putative regulators of filamentous fungal secondary metabolite production was generated and screened for specific genes capable of modulating the production of the polyketide lovastatin by A. terreus. Ten transformants were initially analyzed for each expression plasmid to assess effects on lovastatin production. Since the integration site, copy number, and level of transgene expression is expected to vary among transformants, regulators where at least one transformant produced levels of lovastatin that were rarely detected in negative control transformants (α=0.01) were chosen for confirmation and further analysis. These selected expression plasmids were re-transformed, and new isolates were picked and analyzed by HPLC to confirm that the effect on lovastatin production was specific to the transgene. In addition, individual transformants generating increased levels of lovastatin were re-grown and re-assayed to confirm that production levels were reproducible. Statistical significance of the difference between the means of control and transgenic transformants was measured by bootstrap analysis Hall et al., Biometrics 47:757-62 (1991).

[0299] Preparation of constructs expressing regulators: Gateway cloning technology (Invitrogen Life Technologies, Inc.) was used to generate all fungal expression constructs using protocols recommended by the manufacturer. Selected genes were amplified in a two-step reaction that resulted in PCR products of the coding region flanked by attB recombination sites. In the first round of PCR, gene specific primers were used with the sequence 5′ ACAAAAAAGCAGGCTCCACA+the first 20 bp of the coding region 3′ and sequence 5′ ACAAGAAAGCTGGT+the complement of the last 20 bp of the coding region (including the stop codon) 3′. For the second round of PCR attB general primers were used: 5′ GGGGACAAGTTTGTACAAAAAAGCAGGCT 3′ and 5′ GGGACCACTTTGTACAAGAAAGCTGGT 3′. The attB site-containing PCR products were then cloned in to the entry clone pDONR206 (pMB971; Invitrogen Life Technologies, Inc.) by a BP reaction and the structure of the resulting “entry clones” was confirmed by sequence analysis. Four “destination vectors” (pMB1419, pMB1473, pMB2957 and pMB3082) were constructed for expression of transgenes. pMB1419 is derived from pBC-phleo (Fungal Genetics Stock Center, Department of Microbiology, University of Kansas Medical Center, Kansas City, Kans.). The A. nidulans pgk promoter was inserted between the ApaI and ClaI sites, and the trpC terminator inserted between NotI and SacII sites. A Gateway cassette containing the appropriate attP sites and the ccdB gene was amplified by PCR using the Gateway vector pEZC7201 as a template (Invitrogen Life Technologies, Inc.) and was ligated into the ClaI and NotI sites. pMB1473 was generated by introducing the sequence encoding the herpes simplex virus VP16 acidic activation domain into the ClaI site of pMB1419 such that introduction of a sequence from an entry clone encoding a transcription factor results in an in-frame N-terminal fusion of the activation domain to the transcription factor of interest. pMB2957 contains the phleomycin resistance marker (ble) transcribed from the trpC promoter, and transgenes are expressed from the A. nidulans fadA promoter. pMB3082 is identical to pMB2957, with the exception that transgenes are expressed from the A. nidulans xlnA promoter (Perez-Gonzalez et al., Appl. Environ. Microbiol. 62:2179-82 (1996). Destination clones in which regulatory genes were cloned into the appropriate expression plasmid were made by performing LR reactions with the desired entry clone and the appropriate destination vector according to protocols recommended by the manufacturer. Site-directed mutations in GÉ subunits were constructed using the QuikChange Site-Directed Mutagenesis Kit (Stratagene).

[0300] Transformation of Aspereillus strains: Cultures of A. terreus (Fungal Genetics Stock Center strain 991) or A. nidulans (TJH3.40-Fungal Genetics Stock Center strain A1041) were grown on petri plates containing potato dextrose agar (PDA) (Becton Dickinson) at 30° C. for 3-6 days, and spores were collected by resuspension in Tween-80 (0.03%). Yeast extract sucrose (YES) medium (2% yeast extract, 6% sucrose) with 0.8M sorbitol was inoculated to a density of 1-5×10⁶ spores per ml and incubated with shaking at 26-30° C. for 12-16 hr (250 rpm). Protoplasts were prepared from germlings, frozen and transformed as described Royer et al., Biotechnology 13:1479-83 (1995). Transformation reactions were mixed with 25 ml of molten (50° C.) regeneration minimal medium (trace elements (1000× stock (all g/L)): ZnSO₄ (14.3), CuSO₄ 5H₂O (2.5), NiCl₂ 6H₂O (0.5), FeSO₄ 7H₂O (13.8), MnSO₄H₂O (8.5), citric acid H₂O (3.0), H₃BO₃ (1.0), Na₂MoO₄ (1.0), CoCl₂ 6H₂O (2.5); salts: KCl (0.52 g/L), MgSO₄ (0.52 g/L), KH₂PO₄ (1.52 g/L); 25 mM sodium nitrate, 0.8M sucrose, and 1% agarose at pH 6.5), mixed well and poured onto plates containing 25 ml of regeneration minimal medium with 2× phleomycin, either 60 μg/ml (pMB2957 derivatives) or 300 μg/ml (pMB1419 and pMB1473 derivatives). Transformation plates were incubated at 26° C. for 5-6 days or until colonies started to appear. Transformants were transferred to 12 well plates containing minimal medium (same as regeneration minimal medium but containing 2% instead of 0.8M sucrose) and 1× phleomycin concentration (30 or 150 μg/ml). Plates were incubated at 26° C. for 5-6 days.

[0301] Fermentation for production of lovastatin and analysis of lovastatin production: A. terreus transformants and control strains were grown in 20 ml of modified production medium containing 4% glucose, 0.3% corn steep liquor (Sigma), 0.2% KNO₃, 0.3% KH₂PO₄, 0.05% MgSO₄.7H₂O, 0.05% NaCl, 0.05% polyglycol (Dow Chemical Co.), 0.1% trace elements (see above). The final pH was adjusted to 6.5. For xylose induction studies, a mixture of 3% glucose/1% xylose was used as the carbon source. Spores for shake flask inoculation were removed from plates by dragging the tip of a sterile wooden dowel across the plate surface or by using sterile forceps (if not sporulating). Cultures were grown at 27° C. with agitation (225 rpm) for 5 days.

[0302] To measure lovastatin production, fermentation broth (0.5 ml) was placed in 1 mL 96-well plates and centrifuged to remove mycelia before assaying. Supernatants were transferred to a second 1 mL 96-well plate and frozen at −80° C. Lovastatin production was assayed using either an HMG-CoA reductase inhibition assay (Dale et al., Eur. J. Biochem. 233:506-13 (1995)) or directly by HPLC. For HPLC analysis, aqueous broths from A. terreus strains were filtered (0.45 μM) to remove particulate matter then diluted 1:6 or 1:10 with a 30% aqueous solution of acetonitrile, depending on expected metabolite concentration. Diluted broths (3 μl) were injected onto a Waters Xterra M-C18 reverse phase HPLC column (2.1×50 mm) at a flow rate of 0.65 mL/min, with column temperature maintained at 55+/−5° C. Gradient elution (mobile phase A: 0.7% (w/w) aqueous acetic acid, mobile phase B: acetonitrile; elution profile is isocratic 58% B for 2.5 minutes, followed by a gradient of 58-90% B for 30 seconds) afforded well-resolved UV detection of open lovastatin (hydrolyzed lactone; 238 nm, retention time of 2.5 min). An authentic sample of lovastatin (Sigma) was used to generate a standard integration curve, enabling absolute quantification of lovastatin.

[0303] A. nidulans CreA increases lovastatin production by A. terreus: Transformation of A. terreus FGSC 991 with an expression plasmid for A. nidulans CreA, the carbon catabolite repressor protein (Dowzer et al., Curr. Genet. 15:457-59 (1989)), led to increased lovastatin production (FIG. 4). Nine of 24 creA transformants had lovastatin values (greater than 0.25 mg/ml lovastatin) outside the control range and the populations had significantly different means (p<0.01).

[0304] P. chrysogenum areA increases lovastatin production by A. terreus: Transformation of A. terreus FGSC 991 with an expression plasmid for of P. chrysogenum areA, which encodes a regulator of nitrogen metabolism (Haas et al., Curr. Genet. 27:150-58 (1995)), led to transformants with increased levels of lovastatin production, although to a lesser extent than creA transformants (FIG. 5).

[0305] Constitutively active truncation deletion mutants of the A. nidulans pacC decrease lovastatin production by A. terreus: Transformants containing a constitutively active truncation allele of the A. nidulans pacC gene, a regulator of pH-controlled genes (Denison, Fungal Genet. Biol. 29:61-71 (2000); Orejas et al., Genes Dev. 9:1622-32 (1995); Tilbum et al., EMBO J. 14:779-90 (1995)) produced greatly reduced levels of lovastatin (FIG. 6).

[0306] The α subunit of a heterotrimeric G proteins modulates lovastatin production in A. terreus: We examined the effect of expression of FadA (A. nidulans) and 7 other fungal Gα proteins, Gpa1 (Ustilago maydis), Gna1 (Neurospora crassa), GanB (A. nidulans), Gna3 (N. crassa), Gpa2 (U. maydis), GanA (A. nidulans), and Gna2 (N. crassa) on lovastatin production. Based on structural conservation, we also generated dominant-activated alleles of each Gα protein by site-directed mutagenesis (Gpa1^{G42R}, Gna1^{G42R}, Gpa1^{Q204L}, FadA^{G42R}, GanB^{G45R}, Gna3^{G44R}, Gpa2^{G45R}, GanA^{G47R}, and Gna2^{G43R}).

[0307] A. terreus FGSC 991 transformed with either wild-type ganB or an activated allele (ganB^{G45R}) resulted in strains that produced significantly more lovastatin than control transformants (p<0.01) (FIG. 7). Transformation with expression plasmids containing wild-type gna3 and an activated point mutation (gna3^{G44R}) led to individual transformants that showed elevated expression of lovastatin (FIG. 7). In contrast, several Gα subunits depressed lovastatin production, but only when activated forms were expressed. Expression of Gα proteins from A. nidulans (FadA^{G42R}), N. crassa (Gna1^{G42R) and} U. maydis (Gpa1^{G42R}, Gpa1^{Q204L}) abolished lovastatin production in 5-day cultures of transformants (FIG. 8). Transformants expressing either wild-type or activated forms of U maydis Gpa2, A. nidulans GanA, and N. crassa Gna2 from the fadA promoter did not display significantly increased or reduced lovastatin titers (data not shown).

[0308] To confirm that the moderate enhancement of lovastatin production in gna3^{G44R} transformants was directly related to the expression of the gene, we expressed Gna3^{G44R} under the control of the xylose-inducible xlnA promoter of A. nidulans Perez-Gonzalez et al., Appl. Environ. Microbiol. 62:2179-82 (1996). Transformants containing xlnAp-gna3^{G44R} showed a clear enhancement in lovastatin production in inducing medium (p<0.01), whereas neither the negative control transformants nor the fadAp-gna3^{G44R} transformants were significantly affected by carbon source (FIG. 9 and data not shown).

### EXAMPLE 9

Identification of Additional Genes that Modulate Lovastatin Production

[0309] In order to identify additional genes that could influence secondary metabolism, we established a functional screen for regulators of fungal physiology based on the regulatory region of the S. cerevisiae FLO11 gene. The expression of Flo11, a cell surface flocculin essential for invasive growth and pseudohyphal development (Lo et al., Mol. Biol. Cell. 9:161-71 (1998), is controlled by a large regulatory region that is known to integrate multiple signal transduction pathways that are involved in environmental sensing and response, including pH, carbon, nitrogen and osmolarity (Gagiano et al., J. Bacteriol. 181:6497-6508 (1999); Rupp et al., EMBO J. 18:1257-69 (1999). Thus, genes that modulate expression of Flo11 may modulate expression of genes that influence secondary metabolite production. Several genes were identified using this method. As described in greater detail below and summarized in Table 2, several of these genes increased lovastatin production in A. terreus.

[0310] We generated cDNA libraries from RNA prepared from A. nidulans and P. chrysogenum fermentation biomass, and performed screens in S. cerevisiae to isolate clones that induced expression of the FLO11 promoter. In order to quantify the effects of the A. nidulans clones on FLO11 expression, cDNA expression plasmids were co-transformed with a FLO11ₚ-lacZ reporter construct into the yeast strain 10560-14C, and extracts were analyzed for β-galactosidase activity (results shown below in Table 3). Strains that increased FLO11-lacZ activity also showed increased invasiveness on agar plates, suggesting regulation of the chromosomal FLO11 locus (data not shown). The ORFs identified were subsequently referred to as rfe genes (Regulator of Flo 11 {Eleven}). Fourteen plasmids defining seven genes were isolated from the A. nidulans library, and representative clones were fully sequenced. Bioinformatic analysis identified motifs consistent with a regulatory role for RfeA, RfeB and RfeC. Sequences identical or related to rfeD, rfeE, rfeF and rfeG are present in the NCBI database as unannotated genomic clones from a number of fungal species. An identical screen performed using the P. chrysogenum cDNA expression library led to the isolation of 12 clones, three of which (rfeH (PC23), rfeI, rfeJ) contained open reading frames with homology to Zn-finger transcription factors.

TABLE 3

| Gene | # of | | Flo11-LacZ |
|---|---|---|---|
| ID | isolates | PFAM Hit (E-value) | induction |
| RfeA | 2 | PF00069: pkinase, Protein kinase domain | 1.7 |
| | | (9e−40) | |
| RfeB | 4 | PF00046: homeobox, Homeobox domain | 9.6 |
| | | (6e−06) | |
| RfeC | 3 | PF00096: Zinc finger, C2H2 type | 7.0 |
| | | (2.2e−05) | |
| RfeD | 1 | No significant homologies | 6.8 |
| RfeE | 1 | No significant homologies | 7 |
| RfeF | 2 | No significant homologies | 8.4 |
| RfeG | 1 | No significant homologies | 2.8 |
| Table 3: rfe genes isolated from A. nidulans based on the ability to regulate FLO11 expression. cDNA expression plasmids that increased expression from the FLO11ₚ-neo plasmid were isolated from S. cerevisiae and subject to first-pass sequencing. Representatives from each class were fully sequenced and nucleic acid and | | | |
| # deduced protein sequences for rfe genes were compared against protein and nucleic acid databases. PFAM homology and E-value are indicated where appropriate. The effects of rfe genes on FLO11 expression were quantified using a FLO11ₚ-lacZ reporter (see Materials and Methods.) | | | |

[0311] The rfe genes from both screens were subsequently introduced into A. terreus to assess their ability to modulate lovastatin production. In addition, to test whether increasing the potency of transcriptional regulators would affect metabolite production, putative transcription factors (RfeB, RfeC, RfeH (PC23), RfeI, and RfeJ) were also expressed as N-terminal fusions to the herpes simplex virus VP16 acidic domain, a region previously shown to increase transcriptional activation potential (Sadowski et al., Nature 335:563-64 (1988); Ma et al., Cell 55:443-46 (1988).

[0312] Unmodified RfeH (PC23) enhanced lovastatin production (FIG. 10), while VP16 activated RfeH (PC23) failed to modulate production of the metabolite (data not shown). Conversely, VP16 activated RfeC significantly enhanced production of lovastatin (p<0.01; FIG. 11), while the native gene had no observable effect. Activation-domain fusions to several other proteins either failed to stimulate metabolite production (e.g., RfeB) or eliminated the yield improvements that resulted from expression of the native protein (e.g., CreA, RfeH (PC23); data not shown).

### EXAMPLE 10

Genes that Modulate Lovastatin Production in A. terreus also Modulate Norsolorinic Acid Production in Aspergillus nidulans

[0313] We examined several genes that activate lovastatin production to determine if they modulate production of norsolorinic acid, a colored intermediate in the sterigmatocystin biosynthetic pathway of A. nidulans. As shown in FIG. 12, transformants of ATJH3.40 containing VP16-rfeC, rfeH/Pc23, VP16-truncated pacC, and gpa1^{G42R} produced norsolorinic acid on a minimal medium that failed to induce measurable norsolorinic acid in control transformants. Interestingly, while two of these genes (VP16-rfeC and rfeH/Pc23) had previously been shown to enhance production of lovastatin, a third, gpa1^{G42R} acted to eliminate lovastatin production in A. terreus. The stimulatory effect of VP16-truncated PacC on norsolorinic acid was notable because truncated PacC (but not VP16-truncated PacC) acted to reduce lovastatin production in A. terreus. Transformations with lovE, areA, creA, fadAG^{42R}, ganB and gna3^{G44R} did not significantly alter norsolorinic acid yield.

### EXAMPLE 11

Modulation of (+)-Geodin Production

[0314] (+)-Geodin is derived from the octaketide anthraquinone emodin (Fujimoto et al., Chem Ber 108:1224-28 (1975), an intermediate in the biosynthesis of many natural products (Sankawa et al., Tetrahedron Lett 2125-28 (1973); Franck et al., Angew Chem 78:752-753 (1976); and Birch et al., J Chem Soc Perkin Trans 1:898-904 (1976)). We examined (+)-geodin production in A. terreus transformed with Gα proteins that increased (Gna3^{G44R}, GanB, and GanB^{G45R}) or decreased (FadA^{G42R}, Gna1^{G42R} and Gpa1^{Q204L}) lovastatin production, as well as transformants expressing CreA, RfeC and its chimeric VP16-RfeC analog, and LovE. In assessing geodin production transformants were compared to either transformants containing the appropriate null plasmid or to the wild-type A. terreus strain (MF22) (+)-Geodin production was analyzed by HPLC (UV detection) and LC/MS (high resolution electrospray quadropole time of flight mass spectrometry detection). Profiling by LC/MS identified a variety of (+)-geodin related compounds, with (+)-geodin itself being the most abundant secondary metabolite in broths from control strains. The identity of this compound was confirmed by ¹H nuclear magnetic resonance (NMR) spectroscopy. Mean molar concentrations of metabolites were determined by HPLC from a population of reference and engineered strains. Relative concentrations represent ratio of mean concentration in engineered strains relative to mean concentration in the appropriate reference strain. The results of this analysis are summarized below in Table 4.

TABLE 4
Modulation of (+)-geodin production

| | | GEODIN Relative |
|---|---|---|
| Engineered strain | Reference strain | concentration^{a} |
| MF22 + lovE(MF99) | MF22 | .42 |
| MF22 + VP16-rfeC | MF22 | .12 |
| MF22 + Pc23 | MF22 | NA |
| MF22 + creA | MF22 + control vector | 2.66 |
| MF22 + ganB | MF22 + control vector | 1.95 |
| MF22 + gna3G44R | MF22 + control vector | 1.62 |
| MF22 + ganBG45R | MF22 + control vector | 1.43 |
| MF22 + gpa1Q204L | MF22 | <0.02 |
| MF22 + gna1G42R | MF22 + control vector | <0.06 |
| MF22 + fadAG42R | MF22 | <0.02 |

### EXAMPLE 12

[0315] Modulation of the Production of Three Metabolites in A. terreus: N-Acety1va1y1-N-2-(1H-indol-3-yl)ethenyl]-NÉmethylphenylalaninamide (a modified tripeptide), Methyl 3,4,5-trimethoxy-2-[[2-[(3-pyridinylcarbonylamino]benzoyl]amino]benzoate (an alkaloid), and osoic acid 3-methyl ether, 1-methyl ester (a Polyketide).

[0316] N-Acetylvalyl-N-˜2-(1H-indol-3-yl)ethenyl]-N&-methylphenylalaninamide is an enzymatically modified tripeptide, likely to be non-ribosomal, that functions as an antinephritic agent (Japan. Pat., JP01149766 A2; Nakano, Yoshimasa; Sugawara, Michiharu (Otsuka Pharmaceutical Co., Ltd., Japan. 1989). Methyl 3,4,5-trimethoxy-2-[[2-[(3-pyridinylcarbonylamino]benzoyl]amino]benzoate is an alkaloid derived from anthranillic acid; related compounds have been shown to affect smooth muscle relaxation (Arai, K., et al., Chem. Pharm. Bull. v.29, p. 1005, 1981. Japan. Pat., JP56161362 A2; Kyoto Pharmaceutical Industries, Ltd., Japan. 1981). Osoic acid 3-methyl ether, 1-methyl ester is a Well studied polyketide of A. terreus that has been shown to function as an endothelin binding inhibitor (Ohashi, H., et al., Journal of Antibiotics v.45(10), p. 1684. 1992). We examined the production of these metabolites in A. terreus transformed with Gα proteins that increased (Gna3^{G44R}, GanB, and GanB^{G45R}) or decreased (FadA^{G42R}, Gna1^{G42R} and Gpa1^{Q204L}) lovastatin production, as well as transformants expressing CreA, RfeC and its chimeric VP16-RfeC analog, and LovE. These metabolites were identified in the extracted culture broths of these engineered strains using LCMS (described in example E4), by comparison of chromatographic peaks observed in high-resolution extracted mass chromatograms (Micromass Metabolynx software) with the masses of known A. terreus secondary metabolites (Chapman and Hall Dictionary of Natural Products, version 10:2, February 2002, CRC Publ.). Chromatographic resolution of the compounds was achieved with a 16 minute isocratic elution in 60% acetonitrile (0.1% formic acid): 40% aqueous 0.1% formic acid at a flow rate of 0.2 mL/min over a reverse phase HPLC column (Waters Xterra, 5 μm, 2.1×250 mm) Each metabolite was detected reproducibly, with high mass precision (<10 ppm). In assessing metabolite production, transformants were compared to either transformants containing an analogous control plasmid or to the wild-type A. terreus strain, and no absolute determination of metabolite concentration was attempted with these metabolites. The effects of various genes were found to be highly specific. For example, creA caused an increase in the production of the tripeptide, but had no effect on osoic acid or alkaloid production. In addition, the modulation of lovastatin and geodin described in earlier examples was re-observed using this method of metabolite detection and tracking. See Table 2 for complete results.

### EXAMPLE 13

Overexpression of gpa3 or Lys14 Improves Lovastatin Production in A. terreus

[0317] The effect of A. nidulans gpa3 overexpression and S. cerevisiae lys14 overexpression on lovastain production in A. terreus was examined by transforming A. terreus strain MF22 (ATCC 20542) with a plamid bearing gpa3 (MB3250) or a plamid bearing LYS14 (MB1669). The results of this analysis are summarized in Table 2. Both gpa3 and lys14 overexpression increased lovastatin production.

[0318] For transformation of A. terreus protoplasts were generated from spores that were germinated in rich media. Spores were allowed to germinate for about 20 hrs or until germ tubes were between 5 and 10 spore lengths. The germlings were centrifuged and washed twice with sterile distilled water and once with 1M magnesium sulfate. Germlings were then resuspended in 1M magnesium sulfate containing approximately 2 mg/ml of Novozyme. Tubes were then incubated at 30° C. shaking at 80 rpm for about 2 hours or until most of the hyphae were digested and protoplasts were abundant. Protoplasts were then filtered through one layer of Miracloth. At least one volume of STC (0.8M Sorbitol, 25 mM Tris-HCl pH 7.5, 25 mM CaCl₂) was added and protoplasts were centrifuged. Protoplasts were washed twice with STC. Protoplasts then were resuspended in 1 ml STC and counted in a hemocytometer. A final concentration of approximately 5×10⁷ protoplasts/ml was frozen in a 9:1:0.1 solution of STC, SPTC (0.8M Sorbitol, 40% PEG 4000, 25 mM Tris-HCl pH 8, 50 mM CaCl₂) and DMSO in a Nalgene Cryo cooler at −80° C. (cools −1° C./min). Next, 1-5 μg of DNA comprising the designated plasmid was placed in a 50 ml Falcon tube. 100 μl of previously frozen protoplasts were added to the DNA, gently mixed, and then incubated on ice for 30 minutes. 15 μl of SPTC was added, followed by mixing (by tapping) and incubation at RT for 15 minutes. 500 μl SPTC was added and mixed well by tapping and rolling, then incubated at RT for 15 minutes. 25 mls of regeneration minimal medium was added, mixed well and poured on plates containing 25 mls of regeneration minimal medium with 2× the concentration of selection drug.

[0319] Transformation plates containing phleomycin, a broad-spectrum glycopeptide antibiotic, were incubated at 26° C. for 5-6 days or until colonies started to appear. Regeneration minimal medium contains trace elements, salts, 25 mM sodium nitrate, 0.8M sucrose, and 1% agarose at pH 6.5. Transformants were picked onto new plates with a toothpick (if fungus was sporulating) or with sterile forceps (if fungus did not sporulate). Purification plates contained minimal medium (same as regeneration minimal medium but containing 2% instead of 0.8M sucrose) and 1× drug concentration. Picked transformants were incubated at 26° C. for 5-6 days.

[0320] Transformants were grown in production media to assess secondary metabolite production. Briefly, for A. terreus and lovastatin production, spores were used as the inoculum. Spores were obtained from the purification plate by using a wooden inoculation stick. The medium was RPM containing corn steep liquor, sodium nitrate, potassium phosphate, magnesium sulfate, sodium chloride, P2000 (Dow Chemical), trace elements and lactose or glucose as carbon source. The medium was pH 6.5. Flasks were incubated at 26° C. with shaking at 225 rpm. For static 96-well cultures, the same medium was used and the spores were obtained from the purification plate with a wooden toothpick. 96-well plates were incubated, without shaking, at 26° C.

[0321] PCR analysis of transformants demonstrates that greater than fifty percent of the transformants contain the transgene. Variability in levels of transgene expression can presumably be influenced by integration site and copy number

[0322] Sampling for measurement of lovastatin production was done after 5 days for lovastatin. For shake flask experiments 1-1.5 mls of supernatant was placed into 96-well plates, which were centrifuged and supernatants transferred to new 96-well plates. Samples were frozen at −80° C. for storage and for later assays. Cultures that were grown standing in a 96-well plate were centrifuged and the supernatant was transferred to a new 96 well plate. Samples were frozen at −80° C.

[0323] Lovastatin concentration was determined by high pressure liquid chromatography (HPLC). Briefly, 100 μL of broth sample was removed and diluted 1:10 into 70% H₂O-30% acetonitrile (900 μl). This mixture was centrifuged to pellet debris at 13000 rpm for 5 minutes. 900 μl of this diluted broth was transferred to a vial and the sample was analyzed by HPLC. 10 μl were injected into a Waters HPLC system (996 photo-diode array detector, 600 E pump controller and 717 autosampler) equipped with a YMC-Pack ODS column (Aq-302-3, 150×4.6 mm ID, S-3 μM pore size) and eluted with isocratic 40% aqueous acetic acid (0.7%)-60% acetonitrile for 8 minutes. Lovastatin was detected at 238 nm and was shown to have a retention time of 6.5 minutes. Lovastatin in samples was quantified using a calibration curve created from pure lovastatin samples.

[0324] The results of this study are shown in FIG. 13 which is a graphic depiction of lovastatin culture concentration, as measured by HPLC analysis, from broths of A. terreus cultures expressing the regulators. The number of different transformants tested for each plasmid is listed in parentheses next to the label. Results are shown in standard box plot format. The horizontal line in each individual box represents the median. The corresponding vector control is shown in a hatched same colored box.

### EXAMPLE 14

Modulation of Penicillin Production in P. chrysogenum

[0325] The effect of overexpression of A. nidulans creA, A. terreus LovE, and A. terreus orf13/lovU, a protein related to lovE on penicillin production by P. chrysogenum was investigated as follows. Plasmids MB1325 (vector control), MB1310 (creA), MB1316 (lovE), and MB1317 (orf13) were transformed into P. chrysogenum strain MF1 (ATCC 9480). The results of this analysis are summarized in Table 2. Overexpression of A. nidulans creA, A. terreus LovE, A. terreus orf13/lovU increased penicillin production in P. chrysogenum

[0326] P. chrysogenum was transformed as described immediately above for A. terreus, except transformants were selected on 30 μg/mL phleomycin. Samples for testing penicillin production were obtained by using a plug containing spores and mycelia is used as the culture inoculum. The medium used is the published P2 production medium (Lein (1986), in Overproduction of Microbial Metabolites, Vanek and Hostalek (eds.), Butterworth Heinemann, pp. 105-139) that contains 30% lactose, 5× pharmamedia cotton seed flour, ammonium sulfate, calcium carbonate, potassium phosphate, potassium sulfate, and phenoxyacetic acid, at pH 7. Flasks were incubated at 26° C. with shaking at 225 rpm. Sampling was done after 6 days of growth. 1-1.5 mls of supernatant were placed into 96-well plates. Plates were centrifuged and supernatants transferred to a new 96-well plate for the penicillin assay.

[0327] Standard samples for the penicillin assay contained 0, 25, 50, 100, 200, 300, 400, and 500 μg/mL phenoxymethylpenicillin (sodium salt) dissolved in 10 mM potassium phosphate (pH 7.0). Fermentation broth from test samples was clarified by centrifugation for 10 minutes at 4000 g, and 40 μL of clarified fermentation broth and penicillin standard solutions were pipetted into individual wells of a 96-well UV collection plate. Next, 200 μL of imidazole reagent was pipetted into a 96-well filter plate (0.45 micron). The derivatization reaction of penicillin was initiated by vacuum filtration of imidazole reagent into a collection plate containing the aliquoted samples and standards. The collection plate was placed into a 96-well plate reader at 45 degrees while absorbance at 325 nm was monitored over 20 minutes. A Molecular Dynamics (Sunnyvale, Calif.) 96-well UV/is plate reader was used for all spectrophotometric detection. A 1.2 M aqueous imidazole solution containing mercuric chloride at a concentration of 1 mM, pH 6.8 was prepared as follows: 8.25 g of imidazole was dissolved in 60 mL of water, 10 mL of 5 M HCl was added, and then 10 mL of a solution of mercuric chloride (0.27 g dissolved in 100 mL of water) was added. The pH was adjusted to 6.80+/−0.05 with 5 M HCl and the volume was brought to 100 mL with water (see, e.g., Bundgaard and Ilver (1972), Journal of Pharm. Pharmac: 24: 790-794). The results of this study are shown in FIG. 14 a graphic depiction of penicillin culture concentration, as measured by UV/Spec analysis, from broths of P. chrysogenum cultures expressing the regulators. The number of individual transformants tested for each plasmid is listed in parentheses next to the label. Results are shown in standard box plot format. The horizontal line in each individual box represents the median.

[0328] The results demonstrate that the three heterologous regulators increase penicillin production in P. chrysogenum. Genes for two of these regulators, lovE and orf13 are present in the biosynthetic cluster for another secondary metabolite, lovastatin.

### EXAMPLE 15

Additional Regulators that Increase Lovastatin Production

[0329] The effect of expression of Ustilago maydis ste7, S. cerevisiae vps34, N. crassa nc1, and S. cerevisiae pde2 on lovastatin production in A. terreus. The preparation of expression contructs, transformation, culturing and lovastatin measurement methods were similar to those described above.

[0330] FIG. 15 depicts the results of three different studies (MESFT 10, MESFT 3, and MESFT 33) in which production of lovastatin was measured in numerous different transformants (each represented by a diamond) harboring either a vector expressing STE7 (MB3171-STE7) or a control vector (MB2143). These studies demonstrate that Ustilago maydis ste7 can increase lovastatin production in A. terreus.

[0331] FIG. 16 depicts the results of four different studies (MESFT 10, MESFT 25, MESFT3 and MESFT 33) in which production of lovastatin was measured in numerous different transformants (each represented by a diamond) harboring either a vector expressing VPS34 (MB3163-VPS34) or a control vector (MB2143) or no vector (none). These studies demonstrate that S. cerevisiae vps34 can increase lovastatin production in A. terreus.

[0332] FIG. 17 depicts the results of two different studies (MESFT 15 and MESFT 3) in which production of lovastatin was measured in numerous different transformants (each represented by a diamond) harboring either a vector expressing Nc1 (MB3200-Nc1) or a control vector (MB2143). These studies demonstrate that N. crassa nc1 can increase lovastatin production in A. terreus.

[0333] FIG. 18 depicts the results of two studies in two different strains (MF172 and MF 173) in which production of lovastatin was measured in numerous different transformants (each represented by a diamond) harboring either a vector expressing PDE2 (MB2020-PDE2) or a control vector (MB2143) or no vector (none). These studies demonstrate that S. cerevisiae pde2 can increase lovastatin production in A. terreus.

[0334] A number of embodiments of the invention have been described. Nevertheless, it will be understood that various modifications may be made without departing from the spirit and scope of the invention. Accordingly, other embodiments are within the scope of the following claims.

What is claimed is:

1. A method for modulating production of a secondary metabolite by a fungus, the method comprising increasing the expression or activity of a protein selected from the group consisting of CreA, AreA, GanB, Gna3, FadA, Gna1, Gpa1, RfeH, RfeC, PacC, Lys14, lovU, Ste7, Pde2, Nc1, Vps34, lovE or fungal homologs thereof, provided however, that when the secondary metabolite is sterigmatocystin, then the protein is not FadA; when the secondary metabolite is penicillin and the fungus is Aspergillus nidulans, then the increase in activity is not through mutations that result in expression of truncated forms of PacC or constitutively active forms of FadA; and that when the secondary metabolite is lovastatin and the fungus is Aspergillus terreus, then the increase in expression is not in lovE.

2. The method according to claim 1, wherein expression of the protein is increased.

3. The method according to claim 1, wherein activity of the protein is increased.

4. The method according to claim 1, wherein the protein is encoded by a gene having a dominant negative mutation.

5. The method according to claim 1, wherein the protein is encoded by a gene having a dominant positive mutation.

6. The method of claim 1 wherein the secondary metabolite is a polyketide.

7. The method of claim 6 wherein the polyketide is a statin.

8. The method of claim 6 wherein the polyketide is geodin.

9. The method of claim 6 wherein the polyketide is lovastatin.

10. The method of claim 6 wherein the polyketide is norsolorinic acid.

11. The method of claim 6 wherein the polyketide is osoic acid.

12. The method of claim 1 wherein production of the secondary metabolite is increased.

13. The method of claim 1 wherein expression of the secondary metabolite is decreased.

14. The method of claim 1, further comprising the step of purifying the secondary metabolite from a culture of the fungus.

15. A method for producing a secondary metabolite comprising:
(a) providing a fungal strain harboring a recombinant nucleic acid molecule encoding a protein selected from the group consisting of: CreA, AreA, GanB, Gna3, FadA, Gna1, Gpa1, RfeH, RfeC, PacC, Lys14, LovU, Ste7, Pde2, Nc1, Vps34;
(b) culturing the fungal strain under conditions for producing the secondary metabolite; and
(c) purifying the secondary metabolite from the culture.

16. A method for producing a fungal strain having altered production of a secondary metabolite, the method comprising transforming a fungal strain with a nucleic acid molecule encoding a protein selected from the group consisting of CreA, AreA, GanB, Gna3, FadA, Gna1, Gpa1, RfeH, RfeC, PacC, Lys14, LovE, LovU, Ste7, Pde2, Nc1, Vps34 and fungal homologs thereof.

17. The method of claim 15 or 16 wherein the fungus is A. terreus.

18. The method of claim 17 wherein the secondary metabolite is a polyketide.

19. A method for improving production of a secondary metabolite by a fungus by increasing the yield of the secondary metabolite in the fungus, the method comprising modulating the expression of a gene involved in regulation of secondary metabolite production in a manner that improves the yield of the secondary metabolite, provided however, that when the secondary metabolite is isopenicillin N, then the modulation is not mediated by transcription factor CPCR1; when the secondary metabolite is sterigmatocystin, then the modulation is not through AflR, FadA, or FluG; when the secondary metabolite is aflatoxin, then the modulation is not through AflR; when the secondary metabolite is penicillin and the fungus is Aspergillus nidulans, then the modulation is not through mutations that result in expression of truncated forms of PacC or constitutively active forms of FadA; and when the gene involved in regulation of secondary metabolite production is from Saccharomyces cerevisiae, then the modulation is not through decreased activity or expression of Hog1, Bem2, Rim15, Sfl1, Ira1, Ssd1, Srb11, Swi4, Tpk3 or though increased activity or expression of Afl1, Dhh1, Inv7, Inv8, Ste21, Pet9, Mep2, Inyl, Inv5, Inv6, Inv9, Inv10, Inv11, Inv12, Inv13, Inv14, Inv15, Cdc25, Mcm1, Mga1, Phd2, Pho23, Ptc1, Rim1, Stp22, Tpk2 or Ypr1.

20. The method according to claim 19, wherein the modulation is overexpression of the gene.

21. The method according to claim 19, wherein the modulation is conditional expression of the gene.

22. The method according to claim 19, wherein the modulation is expression of a dominant mutation of the gene.

23. The method according to claim 22, wherein the dominant mutation is a dominant negative mutation.

24. The method according to claim 22, wherein the dominant mutation is a dominant positive mutation.

25. The method according to claim 22 wherein the dominant mutation is a dominant neomorphic mutation.

26. The method according to claim 19, wherein the modulation is mediated by a peptide modulator of gene expression.

27. The method according to claim 26, wherein the peptide modulator is an activator of gene expression.

28. The method according to claim 26, wherein the peptide modulator is an inhibitor of gene expression.

29. The method according to claim 19, wherein the modulation is mediated by a small molecule modulator of gene expression.

30. A method for improving production of a secondary metabolite by a fungus by increasing productivity of the secondary metabolite in the fungus, the method comprising modulating the expression of a gene involved in regulation of secondary metabolite production in a manner that improves the productivity of the secondary metabolite, provided however, that when the secondary metabolite is isopenicillin N, then the modulation is not mediated by transcription factor CPCR1; when the secondary metabolite is sterigmatocystin, then the modulation is not through AflR, FadA, or FluG; when the secondary metabolite is aflatoxin, then the modulation is not through AflR; when the secondary metabolite is penicillin and the fungus is Aspergillus nidulans, then the modulation is not through mutations that result in expression of truncated forms of PacC or constitutively active forms of FadA; and when the gene involved in regulation of secondary metabolite production is from Saccharomyces cerevisiae, then the modulation is not through decreased activity or expression of Hog1, Bem2, Rim15, Sfl1, Ira1, Ssd1, Srb11, Swi4, Tpk3 or though increased activity or expression of Afl1, Dhh1, Inv7, Inv8, Ste21, Pet9, Mep2, Inyl, Inv5, Inv6, Inv9, Inv10, Inv11, Inv12, Inv13, Inv14, Inv15, Cdc25, Mcm1, Mga1, Phd2, Pho23, Ptc1, Rim1, Stp22, Tpk2 or Ypr1.

31. A method for improving production of a secondary metabolite in a fungus by increasing efflux or excretion of the secondary metabolite, the method comprising modulating the expression of a gene involved in regulation of secondary metabolite production in a manner that increases efflux or excretion the secondary metabolite.

32. A method for improving production of a secondary metabolite in a fungus by decreasing production of side products or competing secondary metabolites, the method comprising modulating the expression of a gene involved in regulation of secondary metabolite production in a manner that decreases production of side products or competing secondary metabolites.

33. A method for improving production of a secondary metabolite in a fungus by altering the characteristics of the fungus in a manner that is beneficial to the production of the secondary metabolite, the method comprising modulating the expression of a gene involved in regulation of secondary metabolite production in a manner that alters the characteristics of the fungus.

34. A method for improving production of a secondary metabolite in a fungus by causing conditional lysis of the fungus, the method comprising modulating the expression of a gene involved in regulation of secondary metabolite production in a manner that causes conditional lysis.

35. A method for improving production of a secondary metabolite in a fungus by increasing the resistance of the fungus to the deleterious effects of exposure to a secondary metabolite, the method comprising modulating the expression of a gene involved in regulation of secondary metabolite production in a manner that increases resistance to the deleterious effects of exposure to a secondary metabolite.

The application's sequence listing, which the Patent Office published only in electronic form, follows.

SEQUENCE LISTING (496 sequences)

SEQ ID NO: 1 - DNA, 35 bp, Artificial Sequence
  Synthetically generated oligonucleotide
ggccatcgatacaagtttgtacaaaaaagctgaac

SEQ ID NO: 2 - DNA, 28 bp, Artificial Sequence
  Synthetically generated oligonucleotide
gcggccgcaccactttgtacaagaaagc

SEQ ID NO: 3 - DNA, 34 bp, Aspergillus nidulans
gcggccgcggcgcccggcccatgtcaacaagaat

SEQ ID NO: 4 - DNA, 25 bp, Aspergillus nidulans
ccgcggccgagtggagatgtggagt

SEQ ID NO: 5 - DNA, 30 bp, Aspergillus nidulans
catggggccccgtgatgtctacctgcccac

SEQ ID NO: 6 - DNA, 30 bp, Aspergillus nidulans
catgatcgattgtgggtagttaatggtatg

SEQ ID NO: 7 - DNA, 40 bp, Artificial Sequence
  Primer
acaaaaaagcaggctccacaatgacatcccaccacggtga

SEQ ID NO: 8 - DNA, 35 bp, Artificial Sequence
  Primer
acaagaaagctgggttcattcgctccgtcctttct

SEQ ID NO: 9 - DNA, 40 bp, Artificial Sequence
  Primer
acaaaaaagcaggctccacaatgggccgcggtgacactga

SEQ ID NO: 10 - DNA, 35 bp, Artificial Sequence
  Primer
acaagaaagctgggtctattgggtaggcaggttga

SEQ ID NO: 11 - DNA, 29 bp, Saccharomyces cerevisiae
cgcggatcccgacatattcgaggttgact

SEQ ID NO: 12 - DNA, 29 bp, Saccharomyces cerevisiae
cccaagcttgctagaaatatgaaccttcc

SEQ ID NO: 13 - DNA, 34 bp, Aspergillus niger
catggggccctctctccaccggcactaagatagc

SEQ ID NO: 14 - DNA, 35 bp, Aspergillus niger
cgcggatccagcattggaaaaggaggggggggaag

SEQ ID NO: 15 - DNA, 34 bp, Aspergillus nidulans
cgcggatccatcacaacaagttggtaacagtatc

SEQ ID NO: 16 - DNA, 32 bp, Aspergillus nidulans
ggactagttaacaagacacacttcttcttctt

SEQ ID NO: 17 - DNA, 33 bp, Saccharomyces cerevisiae
cgcggatcctatcttcactcaatatacttccta

SEQ ID NO: 18 - DNA, 33 bp, Saccharomyces cerevisiae
cccaagcttcatcgttgaaacttgataacgcac

SEQ ID NO: 19 - DNA, 33 bp, Aspergillus nidulans
cgcggatccgactaatgagagactataaattag

SEQ ID NO: 20 - DNA, 33 bp, Aspergillus nidulans
ccgctcgagctatagaatagtgcaagtggaagc

SEQ ID NO: 21 - DNA, 1629 bp, Aspergillus terreus
atgacatcccaccacggtgaaacagagaagccacagagcaacacggctcaaatgcagataaatcatgtcactggcctcaggctaggcctggttgtggtttcagtcactctggtggcgtttctgatgctcttggatatgtccatcattgtcacggcgattcctcacattaccgcccagtttcattccctgggcgatgtcggatggtacggaagtgcgtatcttctatcaagctgtgccctccaacccttggcaggcaaactatacactctgttgaccctgaaatacaccttcctcgcttttctcgggttgtttgagattggatcggttctttgcggcactgctcgttcgtcaaccatgttgattgtagggcgagcagtggccggaatgggagggtcggggctcaccaatggcgcaatcaccattctgtcggcggcagctccaaagcaacagcaaccgctcttgattgggatcatgatgggcctaagccaaatcgccattgtatgtggaccgttgcttgggggtgctttcacgcagcacgcaagttggcggtggtgtttttacatcaaccttcccattggggcgtttgccacatttctccttctcgtcatccagatccccaacagattgccatccacgtcggattcaaccacagacggcacaaaccccaagagaagaggggctcgggacgtcttgacccaactggatttccttggattcgtgctcttcgccggttttgcgatcatgatatctcttgctttggagtggggtgggtctgattatgcgtggaatagttccgtgatcatcggcttgttctgtgcggcgggcgtgtcgctggtgctgttcggatgctgggaacggcatgtcggcggtgcagtggccatgattcccatttccgtggccagtcgtcgccaagtctggtgctcctgcttcttcctcggctttttttccggggccctacttattttctcctactacctgcctatctacttccaggcggtcaagaatgtttctcccaccatgagtggagtgtatatgctgccgggcattggtggacagatcgtcatggcgattgtgacgggtgcaatcatcggtaaaacaggctattacgttccgtgggcgctcgcaagcgggatccttgtgtccatatccgccggactggtatcgaccttccagccggaaacctcgattgcagcatgggtcatgtatcagttcctgggaggcgtgggccgaggatgcggaatgcaaacccctgtcgtcgccattcaaaatgcgctgcctccacaaacgagccccatcggcatttcgctagccatgttcggccagacattcggtggctcgctttttctcaccctgaccgaattggtttttagcaatggtttggactctggtctgcgccaatatgcgccaaccctcaatgcacaggaggtaacagccgcaggggccaccggcttccgccaagtggtccccgctcctctcatctctcgggtcctcttagcatacagtaaaggcgtggaccatgcattctacgttgcggtcggtgcgtctggagctaccttcatcttcgcctggggtatgggccggcttgcctggagaggctggcggatgcaggagaaaggacggagcgaatga

SEQ ID NO: 22 - protein, 542 aa, Aspergillus terreus
MTSHHGETEKPQSNTAQMQINHVTGLRLGLVVVSVTLVAFLMLLDMSIIVTAIPHITAQFHSLGDVGWYGSAYLLSSCALQPLAGKLYTLLTLKYTFLAFLGLFEIGSVLCGTARSSTMLIVGRAVAGMGGSGLTNGAITILSAAAPKQQQPLLIGIMMGLSQIAIVCGPLLGGAFTQHASWRWCFYINLPIGAFATFLLLVIQIPNRLPSTSDSTTDGTNPKRRGARDVLTQLDFLGFVLFAGFAIMISLALEWGGSDYAWNSSVIIGLFCAAGVSLVLFGCWERHVGGAVAMIPISVASRRQVWCSCFFLGFFSGALLIFSYYLPIYFQAVKNVSPTMSGVYMLPGIGGQIVMAIVTGAIIGKTGYYVPWALASGILVSISAGLVSTFQPETSIAAWVMYQFLGGVGRGCGMQTPVVAIQNALPPQTSPIGISLAMFGQTFGGSLFLTLTELVFSNGLDSGLRQYAPTLNAQEVTAAGATGFRQVVPAPLISRVLLAYSKGVDHAFYVAVGASGATFIFAWGMGRLAWRGWRMQEKGRSE

SEQ ID NO: 23 - DNA, 1464 bp, Aspergillus terreus
atgggccgcggtgacactgagtccccgaacccagcgacgacctcggaaggtagcggacaaaacgagccagagaaaaagggccgtgatattccattatggagaaaatgtgtcattacgtttgttgttagttggatgactctagtcgttactttctccagtacttgtcttcttcctgccgcccctgaaatcgcgaatgaatttgatatgactgtcgagactatcaatatctccaatgctggtgtcttggttgccatgggatattcatccctcatatggggtcccatgaacaagttagtcggcaggcggacatcatacaatctggccatttcaatgctttgtgcgtgctccgctggaacggcagcggcgataaacgagaaaatgttcatagcgttcagagtattgagcggcttaaccggaacctcgttcatggtctcaggccaaactgttcttgcagatatctttgagcctgtttaccgtgggacggccgtaggtttcttcatggccgggactctttctggccctgcaatagcctgcgtgggaggggtcatcgtcactttcacgagttggcgtgttatcttctggcttcaactaggtatgagcggactggggctcgtgctttccctgctatttttcccgaaaatcgaaggaacttctgagaaggtctcaacggcgtttaaaccgaccacacttgtttcaatcatatcgaaattctccccaacggatgtgctcaagcagtgggtgtatccaaatgtctttcttgccgtaagtgcctgggagatatgccctctgcatctactggaaacgaaatgctcatgccgcaaacaaaaggacttatgctgtggcctcctggcgattacgcaatattcgatcctgacttcagctcgtgctatattcaactcacggtttcatttaacgactgccctagtatcgggtctcttctacctcgctccaggtgccgggttcctgatagggagtctcgtcggcggtaaactttcggatcgcaccgttcggagatacatagtaaagcgcggattccgtctccctcaggatcgactccacagcgggctcatcacattgtttgccgtgctgcctgcgggaacgctcatttacgggtggacactccaagaggataagggtgggatggtagtgcccataatcgcggcgttcttcgcgggctgggggctcatgggcagttttaactgcctgaacacttacgtggctgtagaagccttgccacggaaccggtctgcagtcattgcaggaaagtatatgattcaatactccttttctgcagggagtagtgcgctcgttgtgcccgtcatagacgccctcggagttggatggacgttcacgctatgtgtggttgcttcgactatagctggattgatcacggcggccatcgcacggtgggggataaatatgcaaaggtgggcagaaagggctttcaacctgcctacccaatag

SEQ ID NO: 24 - protein, 487 aa, Aspergillus terreus
MGRGDTESPNPATTSEGSGQNEPEKKGRDIPLWRKCVITFVVSWMTLVVTFSSTCLLPAAPEIANEFDMTVETINISNAGVLVAMGYSSLIWGPMNKLVGRRTSYNLAISMLCACSAGTAAAINEKMFIAFRVLSGLTGTSFMVSGQTVLADIFEPVYRGTAVGFFMAGTLSGPAIACVGGVIVTFTSWRVIFWLQLGMSGLGLVLSLLFFPKIEGTSEKVSTAFKPTTLVSIISKFSPTDVLKQWVYPNVFLAVSAWEICPLHLLETKCSCRKQKDLCCGLLAITQYSILTSARAIFNSRFHLTTALVSGLFYLAPGAGFLIGSLVGGKLSDRTVRRYIVKRGFRLPQDRLHSGLITLFAVLPAGTLIYGWTLQEDKGGMVVPIIAAFFAGWGLMGSFNCLNTYVAVEALPRNRSAVIAGKYMIQYSFSAGSSALVVPVIDALGVGWTFTLCVVASTIAGLITAAIARWGINMQRWAERAFNLPTQ

SEQ ID NO: 25 - DNA, 2229 bp, Aspergillus terreus
atggagagtgcagagctgtcgtcgaagcggcaggcatttcctgcatgtgatgagtgccggatccgtaaggtccgatgcagcaaggagggtccaaagtgctcccattgcctccgatataacctaccctgtgaattctccaacaaagtggcgcgcgacgtcgagaagctcgggagtcgggttggagatatcgaacatgccctccaacgatgcctgtcctttattgatgcccatcagggctttcgtgatctatcaaggccacagtcacaagaaagcgggtacacaagctcaaccagctcagaagagtgtgaagtaaacttgtactcaggcaaacacacttcacccaccgaggaagatggattctggcctctccacggttatggctcttttgtttcactcgtcatggaggcacaggctgctaacgccaacctaacctcttggttaccggtcgatatgaccagcggccaagtcgcagagatggtcgcatttgaccgccaagctgtgtcagctgtgcgctcgaaggtggctgaggcgaatgaaacgcttcaacagatcattgaggatatcccaacactatcggcatccgaaaacgatacctttctcccgtctcttccaccccgcgctctagtggagccgtctatcaacgaatatttcaagaagctgcatccacgactccctatatttagtcgacagactattatggacgcagtggaatctcagtacacaatcagaactgggcctccggacctggtttggattacctctttcaactgcattgtgcttcaggccctgactcaaacatcaattgcgaacaaagtcgtgggatgcacaggacaagacataccaatagattatatgatcataagcctgctgcgtaatatcaggcagtgctataatcgattggaaactcttgttaaaccccggctatcgaatatacgggccctcttttgtttggcacttgtggcaatggagtattttgatttcgcaatttttctgactatctttgctcaagtctgcgagttgtccaggctcattggactccatttaacgacaacgaccccgccaacggaagatggggctgtgggcgaccagcctaaagacttgttctggagcatcttcctcgtcgataagcacgtatccatcattgggggcaaggcctgcctattgccctcgtatgactgcagcgtaccattgcctccatatgactccgctgcgccactaccaaatgcttttgcggcacgcatacgcttggcattcattcttgaggagatatatctgggcttatactcagcaaaatccagcaaaatggaacagagtcgcgtccgccgccgtatccgcagaattgctcgaaaacttagccagtggcacgtgcaacatgagcatgtactgcgtaccggagatccgaataggcctctcgaagagtatatctgtgcaacgcagttgaggtttgcactctcgagctgttgggtacttctgcataaacgcatttggagccaggaaaggggcgctgtctgcctacaacacgctcgggattgtctgatgctgttcaagcaattgtgcgatgggtgtaaatctggtttcagcaatttcgacagcattgtcctgaactattctttgatctcattcatgggaatctatgtccacattgtggaggaagaccagccgatccattcacaggacatggagatactcactttcttcgccatatacacgaaccgttcggcatccaataggtcatctgcatctatctcgtacaaattaagccaagtggccagtcgctgtagcgatattgccctcctcctccagaatttaagggagaggcgttttattccgacaacgatatcacgaagtccaacgccctcatggaacgagccaacctacatggattacgatgtcgccaatgcgtccactagcacaactagcaccggctcttcatataacttgaatatcagcccgcttggtgtacccggagacggccaggtctgggacatatacttcaacccgagagaaataccaatggatggtacaattgcgactccttctgaggatgcaacccaggatttgctgagcaatgatgctggccaatgccttggtttccccgacttttcacttggcattgacaacttctccgactttccacttggcattgacatgactagccaaagcgaatttggtcttattatggaggaggacataattcgatatgagagactactagataggcccgtttag

SEQ ID NO: 26 - protein, 742 aa, Aspergillus terreus
MESAELSSKRQAFPACDECRIRKVRCSKEGPKCSHCLRYNLPCEFSNKVARDVEKLGSRVGDIEHALQRCLSFIDAHQGFRDLSRPQSQESGYTSSTSSEECEVNLYSGKHTSPTEEDGFWPLHGYGSFVSLVMEAQAANANLTSWLPVDMTSGQVAEMVAFDRQAVSAVRSKVAEANETLQQIIEDIPTLSASENDTFLPSLPPRALVEPSINEYFKKLHPRLPIFSRQTIMDAVESQYTIRTGPPDLVWITSFNCIVLQALTQTSIANKVVGCTGQDIPIDYMIISLLRNIRQCYNRLETLVKPRLSNIRALFCLALVAMEYFDFAIFLTIFAQVCELSRLIGLHLTTTTPPTEDGAVGDQPKDLFWSIFLVDKHVSIIGGKACLLPSYDCSVPLPPYDSAAPLPNAFAARIRLAFILEEIYLGLYSAKSSKMEQSRVRRRIRRIARKLSQWHVQHEHVLRTGDPNRPLEEYICATQLRFALSSCWVLLHKRIWSQERGAVCLQHARDCLMLFKQLCDGCKSGFSNFDSIVLNYSLISFMGIYVHIVEEDQPIHSQDMEILTFFAIYTNRSASNRSSASISYKLSQVASRCSDIALLLQNLRERRFIPTTISRSPTPSWNEPTYMDYDVANASTSTTSTGSSYNLNISPLGVPGDGQVWDIYFNPREIPMDGTIATPSEDATQDLLSNDAGQCLGFPDFSLGIDNFSDFPLGIDMTSQSEFGLIMEEDIIRYERLLDRPV

SEQ ID NO: 27 - DNA, 906 bp, Aspergillus terreus
atggagtctaaagtccagacaaatgttccattaccaaaggcaccccttacccaaaaagcccgtgggaagcgtacgaaaggcattcctgcattggtcgcgggtgcttgtgctggggcagttgaaatctccatcacctaccctttcgaatcggctaaaactcgcgcccagcttaagcggagaaaccatgatgtggcagctataaaacctggaatccgaggctggtatgctgggtatggagccaccttggtaggaaccacattgaaagcctccgttcaatttgcctccttcaatatttatcgctcggccctctcgggcccaaatggagagctctcaactggagcttccgtcctggctgggtttggggctggcgtgaccgaggctgtcttagccgtaaccccagcggaggcgatcaagacgaaaatcattgatgcaaggaaggttggaaatgcagagttaagtacgactttcggcgcgatagctggaatccttcgagatcggggaccgcttggattcttctctgcggttggtcctacaattttgcggcagtcgtccaatgcggcagtgaagttcactgtttataacgaacttattgggctggcccgaaaatactcgaagaacggcgaagacgtgcaccctctggcaagcaccttggtcggttctgttactggagtttgttgcgcctggtcgacacagccactggacgtgatcaagacgcgaatgcaatctcttcaggcaagacaactgtacggaaatacctttaactgcgtgaaaacacttctgcgcaatgaaggcattggggttttctggtccggcgtctggtttcggacagggagactttcccttacctcggccatcatgtttcccgtgtacgagaaagtctacaagttcttgacgcagccaaactga

SEQ ID NO: 28 - protein, 301 aa, Aspergillus terreus
MESKVQTNVPLPKAPLTQKARGKRTKGIPALVAGACAGAVEISITYPFESAKTRAQLKRRNHDVAAIKPGIRGWYAGYGATLVGTTLKASVQFASFNIYRSALSGPNGELSTGASVLAGFGAGVTEAVLAVTPAEAIKTKIIDARKVGNAELSTTFGAIAGILRDRGPLGFFSAVGPTILRQSSNAAVKFTVYNELIGLARKYSKNGEDVHPLASTLVGSVTGVCCAWSTQPLDVIKTRMQSLQARQLYGNTFNCVKTLLRNEGIGVFWSGVWFRTGRLSLTSAIMFPVYEKVYKFLTQPN

SEQ ID NO: 29 - DNA, 2391 bp, Aspergillus nidulans
atggctactgactggcaacccgagtgtatggtatcccaaaaccaagcagctctggagagcataggagcccattcagaccgagctcttcagaatacgtctgggaacgtgcaggcatactcagacagcctagcacaccatgacacgactggacgtgatgaccctctacagcattacaccctcaagtaccctcaccctccagtcccagtcccaagccatccactgccaactgccactgccaatctctaccatccccagcttttaagtcatcgataccaggtcaagaagctgcggcgtctccaatcgaatggttcctcatatgcagggtccagaagggggagaagttacttgaagtcacagaagtacttagagtatagggctcggccacgtcgggatactgggaaagatggtgaaccagtatggtcggacgaactggaggatgccttccagcaagctcttgaagcaaacccgcctatggggagacgaaagtggtccgaacgtggaaagtcctacggacgaaacgaactgattgcggagtacatctataaattgactgggaagcgaaggaccaggaaacaagtgtccagtcacttgcaagtacttgactcattcctcaagggtgaccctgattgggagagacttgtccgagaacaatcagatcgttcaactgcccagacgcaaccggtgggaccacgatggagaacctcgatggaccatttgccgtcgagtcactacggcactcacgcaacctcttcttacccggaacccatgaggctgatgcccccttactcggcagacttgcagctacctcagtactcacccacttcaactcaacaagacacaaacaacaacacaatacaaggccttagctttgacatgtgggtcagcgctccaaacaaaccggaccgtattgacgacgcgtaccatttgtatacccgcctccaaggcgaccaacgtcaaccgcccatgccgctggaagatctgaagaactggcgcgtgtcctttccccacctaagctcatcactctcagacgtgaacgatccgctgaactgcgaaataattcttctcgagaccaacctcgagctgatggatgactttcctcctatgggttctagattggggatccacctggaacttgacattgcaaatcctatgtctgggacggcgccaacggtcaaccagatggagaattggacatgtagtacttacatatacgaagacgggaggcgcacgatggaggcatatcacaacctcaccaagccgcatacaacaaaggttaagccgccatttgagtcatcgtggtgggcaaaaaccttcacgaaactgacacaagacaagcgggaagctgagagcaccggacatcaccacgctgctgatgagcgtacccgacggtattttcactctttgaccgcggtgcaggagatccgggctactgtacctccaagcttgcgacgtctacagaaccattatccaggttctcctgctgaagaaagcaagcggatggccatcatcctctggaagttccgccagactcgacccaacgaggttggcacgacgacatggcgaaagctgataacgtctccggaccgtgccttgaccaatagccctagaccgtccactgcaattgatcttcctcctctatccttagactctatcctgctaagcaagcctacttcgaacttataccaggcaccgcctcagcaccatgacctactgcaccagaatgccccctcgcagcagtcttggtccctctatcaaccatctcatgaccatgttaatagcttataccactccgccggcgccttcgattttctaaacagcatcacaaaaccggaagaggggttatcagataagacagccccaacctcagtgcttgaccccttccccaacctcacacaacagactactagccaaacggccggcatcaacgtttccagcggcacaccggtaatgcttcagatccctgatttatccctctcgtccaaccttggaacctatggactcggccatgaaagccactatgtgccgtcacaccataatgcagcaaatctgcacgatcacagcagcaccaccggactaggtcactacttcgccccaagcacccagtcactcgacgaaattagccattcccacgccccatggtcagctccaaacacaacaatctccggcgatactagcggcggcaactaccatcatctaccgtttacgacgtcagatcactccgttacggtatcgcgcgagtcgcaccagaatcacagctttgaggggctactgccttcggatgatctcgttggaatcgttgggggattatctggtgatcctaatatgaacggggcgggccccgaacatacatcttcggcatatgctgaacatactgcggttgaggctgtctag

SEQ ID NO: 30 - protein, 796 aa, Aspergillus nidulans
MATDWQPECMVSQNQAALESIGAHSDRALQNTSGNVQAYSDSLAHHDTTGRDDPLQHYTLKYPHPPVPVPSHPLPTATANLYHPQLLSHRYQVKKLRRLQSNGSSYAGSRRGRSYLKSQKYLEYRARPRRDTGKDGEPVWSDELEDAFQQALEANPPMGRRKWSERGKSYGRNELIAEYIYKLTGKRRTRKQVSSHLQVLDSFLKGDPDWERLVREQSDRSTAQTQPVGPRWRTSMDHLPSSHYGTHATSSYPEPMRLMPPYSADLQLPQYSPTSTQQDTNNNTIQGLSFDMWVSAPNKPDRIDDAYHLYTRLQGDQRQPPMPLEDLKNWRVSFPHLSSSLSDVNDPLNCEIILLETNLELMDDFPPMGSRLGIHLELDIANPMSGTAPTVNQMENWTCSTYIYEDGRRTMEAYHNLTKPHTTKVKPPFESSWWAKTFTKLTQDKREAESTGHHHAADERTRRYFHSLTAVQEIRATVPPSLRRLQNHYPGSPAEESKRMAIILWKFRQTRPNEVGTTTWRKLITSPDRALTNSPRPSTAIDLPPLSLDSILLSKPTSNLYQAPPQHHDLLHQNAPSQQSWSLYQPSHDHVNSLYHSAGAFDFLNSITKPEEGLSDKTAPTSVLDPFPNLTQQTTSQTAGINVSSGTPVMLQIPDLSLSSNLGTYGLGHESHYVPSHHNAANLHDHSSTTGLGHYFAPSTQSLDEISHSHAPWSAPNTTISGDTSGGNYHHLPFTTSDHSVTVSRESHQNHSFEGLLPSDDLVGIVGGLSGDPNMNGAGPEHTSSAYAEHTAVEAV

SEQ ID NO: 31 - DNA, 2313 bp, Saccharomyces cerevisiae
atggataacgttgtagatccgtggtatataaatccctcaggcttcgcgaaagacactcaagatgaggagtatgttcaacatcatgataatgtcaatcctaccatacccccacccgacaattatattttgaataatgaaaacgatgatggcctcgataacttgttaggtatggactactataacatcgatgacctgttgactcaagagttaagagatctggatattcctttagtgccttctcctaagacgggcgatggttcttctgataaaaagaatattgatagaacttggaaccttggtgatgaaaacaacaaagtctcccactatagcaaaaaatcaatgtcctcacacaagagaggtctaagtggcacagcgatatttggatttctcggccataataagacattgagtatttccagtttacagcaatccattctaaatatgtctaaagatccgcaacccatggaactcataaatgaattgggtaatcataatacggtaaaaaataacaatgatgactttgaccatataagggaaaatgatggtgaaaatagctatttgagccaagttttgttgaaacagcaggaggagttaagaattgctcttgaaaaacaaaaggaagtgaacgaaaaattggagaagcagttgagagacaatcaaatacagcaagaaaagttgcgtaaagtattagaagagcaagaagaggtggcgcagaagttggtttctggggctacaaattctaattccaaacctggatctccagtaatactaaagacacctgccatgcaaaacggtagaatgaaagataatgctataatcgtcacaacgaactctgcaaatggcggatatcaatttcctcctccgacgttaatatcgcctcggatgtcaaatacttcaataaatggttcaccatccaggaaataccataggcaacgatatccaaataaaagcccagaaagtaatggattgaaccttttttcctctaacagtggttatttgagagattctgaactgctttcattttctccacaaaattataatttaaacttggacggcttgacttataatgaccataataacaccagtgataaaaacaataatgataaaaaaaatagtactggtgataacatattccgtctgttcgaaaagacttccccgggtgggctaagtatctctccaaggataaatggaaatagtttgagatcgcccttcctcgtcggcacagataaaagcagggatgatcgatatgctgctggcacgttcacgcctagaacacagttgtcacctatccacaagaaaagggaatccgtagtttccacggtctcgacaatatcacaactgcaggatgacactgaacccatccacatgcgaaatacccagaacccaacattaagaaatgcaaacgctttagcgtcatcaagtgtactacctcctattcctggttccagcaataacactccaattaagaattctttgccacaaaaacatgtatttcaacatactcccgtcaaagctccaccaaagaacggaagtaacctagctccgcttctaaatgcaccggatttaacagatcatcagttagaaattaagacacccatacgaaataacagtcactgtgaagtggaaagctatccgcaagtaccacctgtcacacatgatattcacaaaagccccactttgcatagtacgtctcctttaccagatgaaataatacctaggactacgccaatgaaaataaccaagaaaccaactactctgcctccgggtaccattgaccagtacgtcaaggaactacccgacaaactattcgagtgcttataccctaactgtaacaaagtattcaagcgtagatacaacataaggtcgcatattcagacacatttgcaagatagaccgtattcatgcgactttcccggttgcaccaaggcgtttgttcgcaatcatgatttaataagacacaaaatctcccataatgccaagaaatacatctgcccatgcggaaagagatttaatagggaggatgctctaatggtgcatagaagtcggatgatttgcaccggcggtaagaaattagaacattcgatcaacaagaaacttacatctcccaaaaaaagcctgcttgacagcccgcatgacacaagtcccgtaaaagaaactatcgcccgggataaagatgggagcgtcctaatgaaaatggaggaacagctgcgagatgatatgcgcaaacatggattactggatccacccccatccacagcagcgcacgagcaaaactcgaaccgcaccctttcaaacgaaactgatgctctctga

SEQ ID NO: 32 - protein, 770 aa, Saccharomyces cerevisiae
MDNVVDPWYINPSGFAKDTQDEEYVQHHDNVNPTIPPPDNYILNNENDDGLDNLLGMDYYNIDDLLTQELRDLDIPLVPSPKTGDGSSDKKNIDRTWNLGDENNKVSHYSKKSMSSHKRGLSGTAIFGFLGHNKTLSISSLQQSILNMSKDPQPMELINELGNHNTVKNNNDDFDHIRENDGENSYLSQVLLKQQEELRIALEKQKEVNEKLEKQLRDNQIQQEKLRKVLEEQEEVAQKLVSGATNSNSKPGSPVILKTPAMQNGRMKDNAIIVTTNSANGGYQFPPPTLISPRMSNTSINGSPSRKYHRQRYPNKSPESNGLNLFSSNSGYLRDSELLSFSPQNYNLNLDGLTYNDHNNTSDKNNNDKKNSTGDNIFRLFEKTSPGGLSISPRINGNSLRSPFLVGTDKSRDDRYAAGTFTPRTQLSPIHKKRESVVSTVSTISQLQDDTEPIHMRNTQNPTLRNANALASSSVLPPIPGSSNNTPIKNSLPQKHVFQHTPVKAPPKNGSNLAPLLNAPDLTDHQLEIKTPIRNNSHCEVESYPQVPPVTHDIHKSPTLHSTSPLPDEIIPRTTPMKITKKPTTLPPGTIDQYVKELPDKLFECLYPNCNKVFKRRYNIRSHIQTHLQDRPYSCDFPGCTKAFVRNHDLIRHKISHNAKKYICPCGKRFNREDALMVHRSRMICTGGKKLEHSINKKLTSPKKSLLDSPHDTSPVKETIARDKDGSVLMKMEEQLRDDMRKHGLLDPPPSTAAHEQNSNRTLSNETDAL

SEQ ID NO: 33 - DNA, 3972 bp, Saccharomyces cerevisiae
atggctaacgtagaaaaaccaaacgattgttcaggctttcccgttgttgacttgaattcgtgcttttctaacggcttcaataatgagaaacaagaaatagaaatggaaacggatgattcaccgattttattaatgtcatcatcagcttccagagaaaactcaaacactttctctgtgatacagaggacgccagatggaaagatcattaccacaaataataatatgaactccaagattaacaagcaactggacaagttgcccgaaaatttaaggcttaatggtagaacccccagtgggaaactaaggtcatttgtttgcgaggtttgtacgagagcgttcgcaagacaagagcacttgaaaagacattacagatcgcatacaaatgaaaaaccttatccctgtggcctctgcaacagatgctttactaggagggacttactgatcaggcatgctcaaaaaatccatagtggtaatttaggggaaacgatttcccataccaagaaagtgtcgagaactataactaaagctcggaaaaattctgcatcctcagtcaagtttcaaactccaacctatggtactccagataatggtaattttttgaatcgcactactgccaatacaagaagaaaagcaagccctgaagctaatgttaaacgtaagtacttgaaaaaactgacgcgcagggcttcatttagcgcacaatcagcatccagctatgctttgcccgaccaatcttcgctagaacaacatccaaaggatcgtgttaaattttctacgcctgaattagttccacttgacttgaagaatcctgaacttgactcttcgtttgacctgaatatgaatctagatttaaacctaaatctagattccaatttcaatatagcattaaaccgttctgattcttctggatcaacaatgaatttggattataaattgcccgaatcagcaaataactacacatattcttccggctcaccaacccgcgcatatgtcggcgctaacacgaattctaagaacgcttcatttaatgacgcagacttattgtcgtcgtcgtactggataaaagcctataatgatcatttgttttcagtatctgaaagtgatgaaacttctccaatgaactctgaattaaacgacactaaattaatcgtcccagattttaaatcgactatacatcatttgaaggattcaaggtcctcctcttggactgttgctatagataataatagcaataacaataaggtatcagacaaccaacctgatttcgtcgattttcaagaactgctggataatgatactttaggtaatgatttgttagagaccactgccgttttaaaagaatttgaacttttacatgatgatagcgtaagtgctaccgccacgtcaaatgagattgacctttcccatttgaacctatcaaactctccaatttctcctcataagttaatttataagaataaagaggggaccaatgacgatatgttgatttctttcggactcgatcatccttccaatcgcgaagatgatctggataagctatgtaatatgaccagagatgttcaagccatattcagtcaatatttgaaaggagaagagtctaaacgatccctggaagactttttatcaacgtcaaacaggaaagaaaagccagatagcggcaactatactttttatgggttagattgtttaacgttatcgaaaatatcaagagctctgccggcctccactgtgaacaacaatcagccatcgcattccatagaatcaaagctatttaatgaaccaatgagaaatatgtgcattaaagtgcttagatactatgaaaagttcagtcatgatagtagtgagagtgtcatggactctaatccaaacttgctgtccaaagaattgttaatgccagctgtgagtgaattgaacgaatatttagatcttttcaagaataatttccttccccatttccctattattcacccaagcttgcttgatttggatttggatagcttgcaacgatatactaatgaggatgggtatgatgacgctgaaaacgcgcagttgtttgatcgattaagtcaagggacagataaagaatatgattacgagcactatcaaatcttgtccatttcgaaaatcgtttgtttacccttatttatggccacatttggttctttgcataagttcggttacaaatctcaaacaatagaattgtatgagatgagtagaagaattctacattcttttttggagactaaaagaaggtgtcgcagtacaacagtaaatgacagttatcagaacatttggttgatgcaatccctaatattgagcttcatgttcgctctagttgctgattatttggagaaaattgactcctctttgatgaaaaggcaattgtccgcattatgttcaacgatcagatcaaactgtttaccgacaatttctgcaaattctgagaagagtatcaataataacaatgaacctttaacatttggttctcctcttcaatacatcatttttgagtcaaaaattagatgcaccttaatggcttatgatttttgtcagttcttgaaatgtttcttccatattaaattcgatttgtctataaaggaaaaagatgttgaaaccatttatattcccgacaatgagtcaaaatgggccagtgaatcgataatatgtaatgggcatgttgtgcaaaagcaaaatttttatgattttagaaacttttattacagtttcacgtatggacacttacactcaataccagaatttttagggtcatctatgatttattatgaatacgatttaagaaaaggaaccaaatcacatgtgtttttggatcgaatcgatacgaaaaggctagagaggagtcttgacacttcttcctatggcaatgataatatggcagcaaccaataaaaatattgcgatcttaattgatgacaccataattttgaaaaataatttaatgtcaatgagattcatcaaacagattgatcgctcgtttactgagaaggttagaaaaggacaaatagcaaagatatatgattcctttttgaactctgtgaggttgaattttttgaagaattattcagttgaagtattgtgtgaatttttagtagcgttgaacttttcaatccgtaatatttcgtctttatacgtagaagaagaaagtgattgctcccaaagaatgaattctccagagctgccaaggatccacctgaataatcaagcgctttctgtcttcaatttacaaggctattactattgcttcatcctaattatcaaatttttattggattttgaagcaactccaaattttaagttactgagaatttttattgagttgagaagccttgcgaattctattttacttcccacactttcaagattgtatccgcaagagttttctggatttcctgatgttgtatttacgcaacaatttataaataaagataatggtatgcttgtccctggtttatccgcaaatgaacaccataatggtgcaagtgcagctgttaagactaagttagccaaaaagatcaatgttgaagggcttgcaatgtttattaatgaaatcctagttaactcttttaacgatacctcttttttgaatatggaggatcctattcgaaatgaattttcctttgataatggggacagggcagtgacagacttgcctcgttcagcacatttcctatcggataccggcctagaaggtattaacttcagcggcttaaatgattcgcatcaaactgtttctactttgaatcttttacgttacggggaaaatcattcatcaaaacataaaaatggtggaaaggggcaaggatttgccgaaaagtaccaattatctctgaaatatgttactattgccaagttatttttcaccaatgttaaagaaaactacattcattgtcacatgttagataagatggcaagtgatttccacactttggaaaatcatctaaagggaaacagttga

SEQ ID NO: 34 - protein, 1323 aa, Saccharomyces cerevisiae [sequence omitted]

SEQ ID NO: 35 - DNA, 2001 bp, Saccharomyces cerevisiae
atggatatcgagcctactttcaaagggtacattgaagatgaagatgacgctttgcttattcttcaagcaactttggatggcaagttaaagcatataccaagaaggccttatgaaatagaaagaccttatttgatcgtatcaggtagtatattcgtttttattgaagagatatcgggcatcaagagatggactgatggcgtttcttggtctccatcaagaatatcaggcaagtttctaatatacaaggaactagacaaggaaaacgccgggtctaatgctaatgctacttcgagtggcagtactgattccgccgtcattacggatggaacttctggcgcgagaaataacccttcttcgtcgaaaatcaagctacctcctttgaagaatcaccagtttgatttgccacctactatgggccattcaagttttgagtcagagcaagacacctccatttctccatcaaaccgttcgaacttacctttaaagtatactggcctggtgaagaagacaatatctgtgaagctgaagagacctccattcaactcgattgaaaatttacatattgtctcttattattctgtaaaagatataaaacaaaattgtctagtgactcctaaagcttctccttttttgaaagatgttagaccttcacaggaactaattgtcgcgatgggaaatacaaccttaggcaacgtgaaaaacaattccactaccaccggtaatggtcctaataatataaacaataaaagcaactcttccactcccctgaatactgttatttccacgaataacaatagtgctaatataaatgctgctggcagtaatcaatttactagtgcaaacaaaaattattattataaaaatgatgaaagctctggatacccaatcactcaatttgctcccgcattaccatcaacaactttgatgtatacggcgaatccaccttatatcactcaatctcctgataacactaacgctactggtatgaatacacatgttaataataacaataataatagtaataacagtagtaatagtaataatagtaacaataataataataataataataataataataataacaataataataatattaataatattaataatgtcaatactaatgcagggaacggtaacaatccaaatagattccataacgcctcttttgcttataacaccaccggtgactttattaatccgcaacaacaaggacaaatttcttatccattttattatacaacaattccgataaacaatcctaactattataccacacaacctccaaaccctgtaacaaacgcttcaacgaacgagaatcaaggctattccacctcctcaactcaacacccttattatgggcatcctactgaaagtcaatcagcatcagcagccgcaggcgctactggcactcctggtacagccgagaatgtccttcccgtatccagtatgcagccactactccatcaagccaataataatagtgcaagctctgctacctctacagctccttatccggtgtattctatgaatgtgaatgttccttattacaattcttctgcttctgcatacaagagggcacaagaaaatactacttcaaatacgaatgcagaaccttctggtgctacaagcactaactcaggcaccatgctatcaaatcctgcatacgctaattctcagtacactccatcgcaagtgtattaccagggattcccccaatatgccatggcaagtgctcaaaatccgtctatgtatcaacaccagcaccaacatcctttgcccactgtatatccaatagcgacgcctcaacaaaatataatgagctctggtcacactttgagcactattggatctgatcctcaacatcatcactatcaacaagagcccaacgaccacaaaaacttcgctatgggtcacgcgaacaataatatcttaaacatcaccaataatgatacgatgaacaacctcaatacaaacacttcaactactacacaataa

SEQ ID NO: 36 - protein, 666 aa, Saccharomyces cerevisiae
MDIEPTFKGYIEDEDDALLILQATLDGKLKHIPRRPYEIERPYLIVSGSIFVFIEEISGIKRWTDGVSWSPSRISGKFLIYKELDKENAGSNANATSSGSTDSAVITDGTSGARNNPSSSKIKLPPLKNHQFDLPPTMGHSSFESEQDTSISPSNRSNLPLKYTGLVKKTISVKLKRPPFNSIENLHIVSYYSVKDIKQNCLVTPKASPFLKDVRPSQELIVAMGNTTLGNVKNNSTTTGNGPNNINNKSNSSTPLNTVISTNNNSANINAAGSNQFTSANKNYYYKNDESSGYPITQFAPALPSTTLMYTANPPYITQSPDNTNATGMNTHVNNNNNNSNNSSNSNNSNNNNNNNNNNNNNNNNNINNINNVNTNAGNGNNPNRFHNASFAYNTTGDFINPQQQGQISYPFYYTTIPINNPNYYTTQPPNPVTNASTNENQGYSTSSTQHPYYGHPTESQSASAAAGATGTPGTAENVLPVSSMQPLLHQANNNSASSATSTAPYPVYSMNVNVPYYNSSASAYKRAQENTTSNTNAEPSGATSTNSGTMLSNPAYANSQYTPSQVYYQGFPQYAMASAQNPSMYQHQHQHPLPTVYPIATPQQNIMSSGHTLSTIGSDPQHHHYQQEPNDHKNFAMGHANNNILNITNNDTMNNLNTNTSTTTQ

SEQ ID NO: 37 - DNA, 1302 bp, Aspergillus nidulans
atggagcccccagcgatcagccagcaatccacacccacggccccggggggaacgcaagggacacgcaaactgcgcgagagttgcatctcgtgctccagatccaaggtcaagtgcaataaggagaagcccacatgcagtcgatgcgtccgccgtggtctgccttgcgagtatatggtttccaggcgcactggacgcactcgcgtcattggtgttgagcagccaaagacagcaccatcaccaacaacaccgacgaatacgacagcagctactacagcaacgaaggcaggaccaccagttacaacagacagtgctgttcatacacctgtcattactacggcgccctctcccaagccggtgcagatccagtctcctccagccgaaccagatctctggggcgccatcctgtctccgaatacttccacctccaccgacctatcgtcactcctctcggtgaatacaaatttcagtcagctcttcgcctcgctttctccttcgcttcttgagggtatggatggcatggatgccgaaatgcacgcgccggagctgggcgcattgtcggtcgccgacccatcgtcctccatgatgcaggggttagaggcccctaacgctgcccaaccaccgtcttcgaacaccacaagccactcctactgcctgtccatctgcctggatactctcatgcggctctttccgaatgctggcgctaactgcgagcgacccgggcacgagagcaaccccggcaaactgttcactatcgagtccgttattgaggacaacaaacaaatcttggacacagcgcagacaatcctggcttgccgctgcgccgaggatgagtacgtggtcactctcgtctcacttattgtcttcaaggttcttggatggtacgtcgccgcggctcgggataggtcgtcggacccggggcgcgaagaagacttcaactggtcgactgcccaagacagtcgtagaggttcggtctcttcctttgaggagcaggtgctgcatcttcccaccgtcgtcggcacttattgcattgatggccatcatcagagccgcatggcagcccagctggtgctgagcgagctataccgcgtccaacgactggtgactcaggtaagccgtcgcctagaatctattcgccgccgctcctcgagcagctcgagctctgcctctagtaatacaacggactctgacggcgggatgtcgacccccttgtcgtcgaccaccctggtccatctagaagacgatttgcgcaagcgcctgcgtgccgtctcaagcgaaacgatcagcatcctccgccacgcctga

SEQ ID NO: 38 - protein, 433 aa, Aspergillus nidulans
MEPPAISQQSTPTAPGGTQGTRKLRESCISCSRSKVKCNKEKPTCSRCVRRGLPCEYMVSRRTGRTRVIGVEQPKTAPSPTTPTNTTAATTATKAGPPVTTDSAVHTPVITTAPSPKPVQIQSPPAEPDLWGAILSPNTSTSTDLSSLLSVNTNFSQLFASLSPSLLEGMDGMDAEMHAPELGALSVADPSSSMMQGLEAPNAAQPPSSNTTSHSYCLSICLDTLMRLFPNAGANCERPGHESNPGKLFTIESVIEDNKQILDTAQTILACRCAEDEYVVTLVSLIVFKVLGWYVAAARDRSSDPGREEDFNWSTAQDSRRGSVSSFEEQVLHLPTVVGTYCIDGHHQSRMAAQLVLSELYRVQRLVTQVSRRLESIRRRSSSSSSSASSNTTDSDGGMSTPLSSTTLVHLEDDLRKRLRAVSSETISILRHA

SEQ ID NO: 39 - DNA, 2073 bp, Saccharomyces cerevisiae
atggaaggcttcaatccggctgacatagaacatgcgtcaccgattaattcatctgacagccattcatcctcctttgtatatgctctacccaaaagtgctagtgaatatgtagtcaaccataatgagggtcgtgcaagtgcaagtggaaatccagccgcagtgccgtctcccataatgacactgaatctcaaaagcacacattccctcaatattgatcagcatgttcatacctcaacatcgccgacggaaactattgggcatattcatcatgtggaaaagctgaatcaaaacaatttgattcatctggatccagtacccaactttgaagataagtccgatattaagccttggttgcaaaagattttttatcctcaaggaatagaacttgtgatagaaaggtcggacgcatttaaagttgtcttcaagtgtaaagctgctaaaaggggaaggaacgcgagaaggaaaagaaaagataagcccaaaggacaggaccacgaagacgagaaatccaagatcaatgatgacgaattagaatatgcgagtccttctaatgccacagtaaccaatgggcctcaaacatcgcccgatcaaacatcctccataaagccaaagaaaaaaagatgtgtatcgaggtttaataactgtccgtttagagtacgagctacttattcgttaaagaggaaaagatggagcattgttgtaatggacaataaccattcacatcagctaaagtttaaccctgattccgaagagtacaaaaaattcaaagaaaaattaagaaaggataatgacgtagatgcaatcaagaaattcgacgaattggaatacagaactttggccaatttgcccattccaacagctacaatcccctgtgattgtggtttaacaaatgaaatacaaagtttcaatgtcgtattgcccactaacagtaatgttacttcatcagcatcctcttcaactgtatcgtccatatcccttgattcatcgaatgcatctaaaaggccatgcttaccctctgtaaataacaccggtagtatcaataccaataacgtaaggaaaccgaaaagccagtgtaagaataaagacacactcttaaaaagaaccaccatgcagaactttctcacaactaaatcaaggctgcgtaagaccggtacgccaacatcttcgcaacactcatctacagcattttcaggatatattgatgatcctttcaatttgaatgaaatcttgccactgccggcatccgatttcaagctaaacactgtaacaaatttgaacgaaattgactttacgaacatttttaccaaatcgccgcatccacatagcgggtctacccatccaagacaagtcttcgaccaattggacgattgttcctctatactcttctctccattaactacaaacacgaataatgaatttgaaggagagtcagatgattttgttcattctccatatttgaactcagaggcagatttcagccaaattcttagtagtgctcccccagtccatcatgacccaaatgaaacacatcaggaaaaccaggatattattgatagatttgctaatagttcccaagaacataatgagtatattctacaatatttgacgcactccgatgctgctaaccacaataacatcggcgttccaaacaacaattcacattcgctaaatactcagcataacgtttctgatctgggcaactcacttttaagacaagaagctttagttggcagctcttcaacaaaaatcttcgacgaattgaaatttgtacaaaatggcccacacggttctcaacatcctatagattttcaacatgttgaccatcgtcatctcagctctaatgaacctcaagtacgatcacatcaatatggtccgcaacagcagccaccgcagcaattgcaatatcaccaaaatcagccccacgacggccataaccacgaacagcaccaaacagtacaaaaggatatgcaaacgcatgaatcgctagaaataatgggaaacacattattggaagagttcaaagacattaaaatggtgaacggcgagttgaagtatgtgaagccagaagattag

SEQ ID NO: 40 - protein, 690 aa, Saccharomyces cerevisiae
MEGFNPADIEHASPINSSDSHSSSFVYALPKSASEYVVNHNEGRASASGNPAAVPSPIMTLNLKSTHSLNIDQHVHTSTSPTETIGHIHHVEKLNQNNLIHLDPVPNFEDKSDIKPWLQKIFYPQGIELVIERSDAFKVVFKCKAAKRGRNARRKRKDKPKGQDHEDEKSKINDDELEYASPSNATVTNGPQTSPDQTSSIKPKKKRCVSRFNNCPFRVRATYSLKRKRWSIVVMDNNHSHQLKFNPDSEEYKKFKEKLRKDNDVDAIKKFDELEYRTLANLPIPTATIPCDCGLTNEIQSFNVVLPTNSNVTSSASSSTVSSISLDSSNASKRPCLPSVNNTGSINTNNVRKPKSQCKNKDTLLKRTTMQNFLTTKSRLRKTGTPTSSQHSSTAFSGYIDDPFNLNEILPLPASDFKLNTVTNLNEIDFTNIFTKSPHPHSGSTHPRQVFDQLDDCSSILFSPLTTNTNNEFEGESDDFVHSPYLNSEADFSQILSSAPPVHHDPNETHQENQDIIDRFANSSQEHNEYILQYLTHSDAANHNNIGVPNNNSHSLNTQHNVSDLGNSLLRQEALVGSSSTKIFDELKFVQNGPHGSQHPIDFQHVDHRHLSSNEPQVRSHQYGPQQQPPQQLQYHQNQPHDGHNHEQHQTVQKDMQTHESLEIMGNTLLEEFKDIKMVNGELKYVKPED

SEQ ID NO: 41 - DNA, 1989 bp, Aspergillus nidulans
atggcctcaccagccgctccgaaacacaaacctttcaagcaggcctgtgacaactgtcgccggaggaaaatcaagtgctcacgagagctcccgtgcgacaagtgccagcgcctgctcctttcctgctcctacagcgatgtgctgcgtcgcaaagggccgaaatttcggactctataccctctagcgcctatccatccactagtggccagagaccgacagattctccagtatgatcctccacgattctctgcagagagggaatggtatgcagagcctacgagctacccggtcggcggctcgcccacgtctccgcccttcatggaagagccgcaatatctgccgcctgaacaccctgactcattcagccggctgcctccaccagaactcgtctcttcgccggattctctgaactccctatcggactctccgactgcggtgctgtttcgttcgccgcggattctgaccgcacctgtgcttctggcgcacgtcaatgtctacttgaaatatatgtttcctatcatgcccgtggtccgaagagaagagctccagcaggactgccaccatccagagcgtctaactccccagcggtacgcctttctggcctccctatgtgccgccacacatatccagctgaaactcgacggagcaacgcccgtcgcggatccttcgcattttcaggccggtgagaactcatcaatgtccggtgaagaactgctcgccgaagccgtgcgcgcaaggaaagattgcgacccaattgaggatatgaatgttgagagtcttctaacctcattcttcctatttgcttcatacggaaatctagaccgccaggaccacgcatggttctatctttgccaggcgacatcaatggttttcgcattgggcttgcaccgcgaatcaacatacgccgagttgaacaccgaagaagcagaacagaagcgacgggtcttctggctgctcttcatcacagaacgaggctatgccctccaacaagcgaaacctgtcatgctccgcaactccatccacaaaccgcaagtcctgtgctccgacgacccgattctcgcctacggcttcatcaacctcatcggcgtcttcgagagcctcagcgtcaacctttacgactgggtctcagcagggggaagcgtaagcggaggtggaaataaccgagacggctcctccgagatgccgcctacatcagccatccaggcaactctcagcaaaccgatctcgctcgagggtgtctcggaaatccaaaaggttgatatcctcatcacacagcagtggcttcaggccatgatgtggaaactctccatgacgcgtgcatcgcagccaggctcgcggaatgagacggtcctcccgttccatcttcctgtaatggtgggcaaggctgttatgtctgtcattgcggaggcatcgcagggggctgtcgacgcgcatgggattgggatggaacaaaagctcttcgatcttggtacatctatcgccgacgtctcacgttctctctccacaaaagctgcaaacagcctcgccgagtcaaccgtcgacccccgcgagctcctctggggtatcctttccaccctctcccgcatccgtggctcccagtcgtacctcttcccatctctccttgagcgctgcaaaggcaccctcggctttgattccccgacgccgctttctatcagtgacttccaccagattaatcctccgcttctcaattccgctagctcttcttcaattgcttctgaaactttagatatctctggaccatggcccgcggctgatgacaatactatggattctagcacaggcagcaggacaacaaattcgtgtgcatgggaaataacttctggtgatacgaacgaccagaaccagactagtgatcagccgccttcattgtctggatcatcgtcagtacccctttcggtctcgcgaatgcattcgtccactagtatggctgcagaactctcgtttcaagctgggaggttattgacttga

SEQ ID NO: 42 - protein, 662 aa, Aspergillus nidulans
MASPAAPKHKPFKQACDNCRRRKIKCSRELPCDKCQRLLLSCSYSDVLRRKGPKFRTLYPLAPIHPLVARDRQILQYDPPRFSAEREWYAEPTSYPVGGSPTSPPFMEEPQYLPPEHPDSFSRLPPPELVSSPDSLNSLSDSPTAVLFRSPRILTAPVLLAHVNVYLKYMFPIMPVVRREELQQDCHHPERLTPQRYAFLASLCAATHIQLKLDGATPVADPSHFQAGENSSMSGEELLAEAVRARKDCDPIEDMNVESLLTSFFLFASYGNLDRQDHAWFYLCQATSMVFALGLHRESTYAELNTEEAEQKRRVFWLLFITERGYALQQAKPVMLRNSIHKPQVLCSDDPILAYGFINLIGVFESLSVNLYDWVSAGGSVSGGGNNRDGSSEMPPTSAIQATLSKPISLEGVSEIQKVDILITQQWLQAMMWKLSMTRASQPGSRNETVLPFHLPVMVGKAVMSVIAEASQGAVDAHGIGMEQKLFDLGTSIADVSRSLSTKAANSLAESTVDPRELLWGILSTLSRIRGSQSYLFPSLLERCKGTLGFDSPTPLSISDFHQINPPLLNSASSSSIASETLDISGPWPAADDNTMDSSTGSRTTNSCAWEITSGDTNDQNQTSDQPPSLSGSSSVPLSVSRMHSSTSMAAELSFQAGRLLT

SEQ ID NO: 43 - DNA, 2631 bp, Aspergillus nidulans
atgtctgggttgactctcgggggtggttctggccgtgtgcgaccgacacaagccgctgccgcttttcccacctcgcatgatttcgccgaccctgatcgctcgtccgtcgcccgcaatgccaaccggccctcccgccgtttcgctgcacctccgcagctgtccgacgacttctcgctcgagtcacccactgattccgctcaagttcacgacaacctcctccaggacgctttattccccgaatggaaggccaattctcctcgaggggtcgacagccctgatgagatgcagaagaaggatccgttagcgactcaaatatggaagctctattctagaacgaaagctcagttgcccaaccaagagcgcatggaaaatttgacctggcggatgatggctctgagtctgaggcgtcaggaaagagagcgcgcccagcagcaagcccgtgcctccagccaaaagagtcctgttcctggcatgagtggcatcgctcagctccgtctgtctgatcgtgtttccaataccccgaccacaactgcagatactgtctcagatgctatgaaccttgacgacttcatcatccctttctctccgtctgaccacccatctccctccacaacgaaagcctccgaagccactactggtgctatacctatcaaagcccgcagggatcagtccgcgtcggaagccaccccagtacctgcatctttccctcacccggcccaggatcagcggagggagagtgagttcggatacgtaccgcgtagagtgcgcaagacgagcatcgatgagcgtcaattcttcaacctgcagattccgtcccgcaagcggccggccgagtcctcgcctcacgtaccgcctgtgtccaccagcatgctagctcatgacccggatttctcacatgctgtaccggagtataccttggatacttcgcatggactgtctctacagaatcagatgaacgctcagcagctcgccaatgctcagaaccacacctcccccaatatggcgttcgctctggatactttcaacctgggcgacgatcctatccttccatctgctggtccttaccagcagcaattcactttctcgcccagcgagtcaccgatgaccagcggtaacccgtttgccaacctctacgctcagactccgattgcctcttcactcaactcaaccgacttcttctctcctccgccgtccggctatcagtcgactgcttcgactcctcagcctgcgtatgatggcgaacactccaagtattttgatatgcccgtcgacgcgcggtcgcaacgccgggttgttcccgcttacattactcagcgatcatcgaatttgtctgcctcgctgcaacctcgatatatgtacaaccagggtggttcgtcccaggatattacacagcagaatgcccatatgggggcccagtcttcatccatgcaatcccctggcttttctatcccgcagcatgttgatccaacgcaagtgttgaatccgaacgagtttaacggtaaccacgccgcaatgttcagtttcggcgccgactcggatgttgaagatgacgatgggaaccaattttcggccggaggactggcaatgccagccgagttcggcgacgacagtatcagtgacatgaatagcaacatggcgtgggagacatcatatcccaactctttccagtcgctgcctgcttttgctgcacagcaccgaaagcatgttaccatcgggtctgcggacatgatggataccccgagcgagtggaaccagggcggaagcctaggtcgaactcacgagtcggctgcgtcagtcagcgaggtgcgcaatcgggatcaagaccctcgacggcagaagatcgctcgcacctcgtccactccaaacacagcccaactactacgccagagcatgcagaaccaatcgtcccacacgtctcccaacactccgcccgagtcgggtctaaacagcgctgctccatcgcggcccgccagtccaggcgggaccaagaacggagagcagaatggtcccaccacctgcacgaactgctttacgcagaccacaccgctgtggcggcgtaaccctgaaggtcagccgctgtgcaacgcctgcggtttgtttttgaagttgcacggcgtggtgcgcccactgtcgctcaagaccgatgtgatcaagaagcgtaaccgcaacagcgccaatagccttgccgttggctcttcacgggtatccaaaaagtcagcccgcaagaactcggttcagcaggtaactccgactgcgcctacctcgagccgggcccaaagcaatacgacatccgagtctcccccagcaatgccgggtagctccggccgaggctctggagtcgttcctattgcggctgccccgcctaaatctagctcagcggcgactacgtctccgggcacaaacaacggttgtggtgcggtacaggtggctcctaaacgtcagcgtaggctggaaaaggcctctgatgttgatatggcggaaagcccgtccagtacctcgtccggtggacgatccaaggttgttccattggcgccggctatgcctccagcggccgtcaacccagccaaccacagtatcgctgctggtcagggcgcaagccaggaatgggagtggttgacgatgagtttgtag

SEQ ID NO: 44 - protein, 876 aa, Aspergillus nidulans
MSGLTLGGGSGRVRPTQAAAAFPTSHDFADPDRSSVARNANRPSRRFAAPPQLSDDFSLESPTDSAQVHDNLLQDALFPEWKANSPRGVDSPDEMQKKDPLATQIWKLYSRTKAQLPNQERMENLTWRMMALSLRRQERERAQQQARASSQKSPVPGMSGIAQLRLSDRVSNTPTTTADTVSDAMNLDDFIIPFSPSDHPSPSTTKASEATTGAIPIKARRDQSASEATPVPASFPHPAQDQRRESEFGYVPRRVRKTSIDERQFFNLQIPSRKRPAESSPHVPPVSTSMLAHDPDFSHAVPEYTLDTSHGLSLQNQMNAQQLANAQNHTSPNMAFALDTFNLGDDPILPSAGPYQQQFTFSPSESPMTSGNPFANLYAQTPIASSLNSTDFFSPPPSGYQSTASTPQPAYDGEHSKYFDMPVDARSQRRVVPAYITQRSSNLSASLQPRYMYNQGGSSQDITQQNAHMGAQSSSMQSPGFSIPQHVDPTQVLNPNEFNGNHAAMFSFGADSDVEDDDGNQFSAGGLAMPAEFGDDSISDMNSNMAWETSYPNSFQSLPAFAAQHRKHVTIGSADMMDTPSEWNQGGSLGRTHESAASVSEVRNRDQDPRRQKIARTSSTPNTAQLLRQSMQNQSSHTSPNTPPESGLNSAAPSRPASPGGTKNGEQNGPTTCTNCFTQTTPLWRRNPEGQPLCNACGLFLKLHGVVRPLSLKTDVIKKRNRNSANSLAVGSSRVSKKSARKNSVQQVTPTAPTSSRAQSNTTSESPPAMPGSSGRGSGVVPIAAAPPKSSSAATTSPGTNNGCGAVQVAPKRQRRLEKASDVDMAESPSSTSSGGRSKVVPLAPAMPPAAVNPANHSIAAGQGASQEWEWLTMSL

SEQ ID NO: 45 - DNA, 1767 bp, Saccharomyces cerevisiae
atgtcaagcttatacatcaaaacaccactgcatgcattatctgctggtccggattctcatgcaaatagctcctattatgacaatcttttattgccttcattttccaatttatccagtaatatcagcaggaacaatatcacaaccgataacaatataaattcagcaagtcctaggaagtattcgtttcattcgctcaatgtgtcgccaattctttccccaatatctttggctaacgaaatacttggaaaaaaatcaaatactgcaccagcatcgccacatcatatggattacaatccaatttcctcattaacaccaggcaattcaccagaattcaacaaggcaagcttatctcagattagttttacaaatccattgaactatgggtctggcttaggtttttcctctaattcacaacctcgactaccattgttagacaggctatcgtccgtctctttatctaagagaccggagcgcccacaacaaagcctaccatcactaaggcatctgcaattattacccagtcctcttttacaagaaaacgcagcacgcttccctgatacatcaaaacgtacatctaattggaaaactgatcttacccattggtgtaaggatacaaactatcaagactatgttaaaatacgcgaagaagtggctcatttcaagccattaagtatacccaacttaactaataatcaaaataatgatagtttcaattacggcaaggaattggaatcgactaggtcgtccaagttccattccccgtctaaggaatcatttgatcgtaccaaactaattccttcgattctagaagctaaagatcaatttaaagatctttccaacaatgcatggagtattactcctcccgtcacaccgccgatgagtccaccaaccaatagaaccatggagcgcacgacgcttagaggagtagaggcctctttttttgaggggaaatccagcaataacgattcaatattcaatccaattattagtgaaaaattggttcaagaagttaaacatcaaagacaattacgtggaaattcatttcccatgccaaatgccagtcacaaaaagacgaacagtttcaaagctttgcaaataaaaaaattgcttgcgaatagagacattctatcgaacaattccaaatctaatgtaaggaaaccatctaagaacaaaatctcaaagcaagcatcaaatgttttcggtaacactgcaagacaattggtgatgaaactcgacaacgctagttacagttctgtctctgcatcttcatctccatctccctccacaccgacgaaaagtggcaagatgagatcaagatcatcctcacctgtgcgtcccaaggcatacactccaagcccaaggtcacccaattatcatagatttgctctcgactctccccctcaaagccctcgaagatcatcaaattcaagcataacgaaaaagggaagtagaaggtccagtggctcatcacccactcgtcacaccacaagagtgtgcgtgtcgtgtcattcgagtgattcgccctgttggaggccatcgtggtcgccaagaaagcaagatcagctatgtaactcttgtggtcttcgatataaaaaaacacatacaagatgtttgaacgatttatgtcgtaagatccccacaaagggtgaaataaacattatgaaatccaatggaatagacaaagaattcgtccccgaacgcaactgcgaaattgaagggtaccgttgcttattttgtaattacataactgagacagtagagaattga

SEQ ID NO: 46 - protein, 588 aa, Saccharomyces cerevisiae
MSSLYIKTPLHALSAGPDSHANSSYYDNLLLPSFSNLSSNISRNNITTDNNINSASPRKYSFHSLNVSPILSPISLANEILGKKSNTAPASPHHMDYNPISSLTPGNSPEFNKASLSQISFTNPLNYGSGLGFSSNSQPRLPLLDRLSSVSLSKRPERPQQSLPSLRHLQLLPSPLLQENAARFPDTSKRTSNWKTDLTHWCKDTNYQDYVKIREEVAHFKPLSIPNLTNNQNNDSFNYGKELESTRSSKFHSPSKESFDRTKLIPSILEAKDQFKDLSNNAWSITPPVTPPMSPPTNRTMERTTLRGVEASFFEGKSSNNDSIFNPIISEKLVQEVKHQRQLRGNSFPMPNASHKKTNSFKALQIKKLLANRDILSNNSKSNVRKPSKNKISKQASNVFGNTARQLVMKLDNASYSSVSASSSPSPSTPTKSGKMRSRSSSPVRPKAYTPSPRSPNYHRFALDSPPQSPRRSSNSSITKKGSRRSSGSSPTRHTTRVCVSCHSSDSPCWRPSWSPRKQDQLCNSCGLRYKKTHTRCLNDLCRKIPTKGEINIMKSNGIDKEFVPERNCEIEGYRCLFCNYITETVEN

SEQ ID NO: 47 - DNA, 1629 bp, Saccharomyces cerevisiae
atgggcaatcagtcattagttgtgcttacggaaagtaagggtgagtatgagaatgagacagaactacctgttaaaaaatcgtcacgagataataatatcggagaatctttaacagcaacagcttttacgcagtctgaagatgaaatggtagatagcaatcagaaatggcagaacccaaactattttaaatatgcatggcaagaatatctttttatattcacatgcatgataagtcagcttctaaatcaagcaggcactacacagactctttcgatcatgaatattctttcggacagttttggctcagaaggaaactcaaagtcatggctgatggcatcttttccgctagtttcaggctcatttattttgattagtggcagactaggtgacatatacggattaaaaaaaatgttgttagtaggatatgttctggttattatatggtctttgatttgtgggattaccaagtattctggtagcgatactttttttattattagtagagccttccaagggctagggattgcatttgttttacctaatgtgctgggaataattggtaatatatatgtaggtggtacttttcgtaaaaacatcgtgattagttttgttggtgcgatggcccctattggagcaactttaggttgtctttttgcaggactgatcggtaccgaggacccaaaacaatggccatgggcattctacgcgtatagcatagccgctttcattaattttgtgctctccatatatgccattccgagtactataccaacaaatattcatcatttttctatggattggattggttctgttttgggcgtgataggtctcattttattaaattttgtgtggaaccaagctcctatatcgggttggaaccaggcttacatcatcgtaattttaatcatttctgtgatttttcttgtcgttttcatcatttatgagattcgatttgccaagactccactattgccgcgcgcagttataaaggatcgtcatatgattcaaattatgctggctttattctttggatggggctcttttggcatctttacgttttattatttccaatttcaattaaatataaggcagtacacggcattatgggctggtggaacttactttatgtttttaatttggggtattattgccgccttactggtaggatttactatcaagaatgtgtctccatcagtgtttttgttcttttctatggtagcattcaatgtgggctcaataatggcaagtgttacaccggttcacgagacatactttcgtactcagttaggaacgatgataattttaagttttgggatggatctttcatttcctgcttcttccattatctttagtgataatttaccgatggagtaccaaggcatggctgggtcattggtgaatactgttgtcaattactccatgtccttgtgtctcggtatgggtgccacagtagagacacaggtcaattcagacggaaagcatcttttgaaaggctatagaggtgctcagtaccttgggataggattggcaagtttagcatgcatgattagcgggctttacatggtcgaaagcttcataaaaggccgcagggcaagagctgctgcagaatacgattgcactgtggcttag

SEQ ID NO: 48 - protein, 542 aa, Saccharomyces cerevisiae
MGNQSLVVLTESKGEYENETELPVKKSSRDNNIGESLTATAFTQSEDEMVDSNQKWQNPNYFKYAWQEYLFIFTCMISQLLNQAGTTQTLSIMNILSDSFGSEGNSKSWLMASFPLVSGSFILISGRLGDIYGLKKMLLVGYVLVIIWSLICGITKYSGSDTFFIISRAFQGLGIAFVLPNVLGIIGNIYVGGTFRKNIVISFVGAMAPIGATLGCLFAGLIGTEDPKQWPWAFYAYSIAAFINFVLSIYAIPSTIPTNIHHFSMDWIGSVLGVIGLILLNFVWNQAPISGWNQAYIIVILIISVIFLVVFIIYEIRFAKTPLLPRAVIKDRHMIQIMLALFFGWGSFGIFTFYYFQFQLNIRQYTALWAGGTYFMFLIWGIIAALLVGFTIKNVSPSVFLFFSMVAFNVGSIMASVTPVHETYFRTQLGTMIILSFGMDLSFPASSIIFSDNLPMEYQGMAGSLVNTVVNYSMSLCLGMGATVETQVNSDGKHLLKGYRGAQYLGIGLASLACMISGLYMVESFIKGRRARAAAEYDCTVA

SEQ ID NO: 49 - DNA, 1830 bp, Saccharomyces cerevisiae
atgctatcttcagaagattttggatcttctgggaaaaaggaaacttctcctgattcgatatcgatacgttcctttagtgccgggaataatttccaatcatcatcaagtgagaaaacttattctaagcaaaaatccgggagtgacaaacttatacatagatttgcggattcattcaaaagagccgagggtagcactacaagaactaagcaaataaatgaaaatacgtctgatttagaggatggcgttgagtctatcacgtcggattccaagttgaaaaagtccatgaagtcgcgccatgttgtcatgatgtctttagggacaggtattgggactggtcttttggtagctaatgcaaaaggtctacattacggtggtcctgctgcgctaataattggttacatcttggtttctttcgagacgtacttcatgatccaagctgcaggtgagatggcggtaacctatccgactttaccagcaaatttcaacgcatactcctccatattcatttccaaatcatttggattcgccacagtatggctttactgtttccaatggctaacggttttgcctttagagttaataaccgcgtctatgactattcaatttgggaatgataaaataaatccggacatttatattcttattttctatgttttcttagtattcattcatttcttcggtgtaaaagcctatggtgaaacggaattcatcttcaattgctgtaaaattttaatgattgcaggtttcattattctttctattgttatcaactgtggtggggccggaaatgacggttatatcggggccacttattggcataatccaggtgcttttgcaggtgacacatcgattggtaggttcaaaaacgtttgctatattttagttactgcttacttctcctttggtggtatggaattatttgcactaagtgttcaggaacagtctaaccctagaaaatctactccggtggcagccaagagaagcatttatcgtatcgttgtgatttatcttttgactatgatcctcattggattcaatgttccatataatgatgaccaactaatgggcgcaggcggatccgctacacatgcatctccctatgtcttagccgcttctattcacggtgtgaaaattgttccacatattatcaacgctgttattttgatttctgtggtttcagtggcaaattcctctttgtatgctggtccaagactgatttgctctttggcccaacaaggctacgcacccaagtttttagattacgttgacagagagggcaggcccttgagagctcttattgtgtgttgcgttttcggcgtcattgcttttgttgcagcttcatcaaaggaagagatcgtgtttacatggttagcagctatcgcaggcttgagtgaattattcacatggacttccataatgttgtcccatctgcgattcagacaagcaatgaaagtacagggaaggtctctagacgagttgggatacaaggccacaacagggatttggggttccatatacggtgtcttttttaatattttagtctttgttgcccaattttgggtagcattggcccccttaggtaatgggggcaaatgcgatgcggaatccttctttcaaaattatttagcttttccaatatggttggccttttacttcggatatatggtttacaaccgagattttacgctattaaatcccctcgacaagattgaccttgacttccacagacgcatttatgatccagagctaatgagacaagaggacgaagaaaataaagaaaaactaaggaatatgtctttgatgagaaaagcttatcatttctggtgttaa

SEQ ID NO: 50 - protein, 609 aa, Saccharomyces cerevisiae
MLSSEDFGSSGKKETSPDSISIRSFSAGNNFQSSSSEKTYSKQKSGSDKLIHRFADSFKRAEGSTTRTKQINENTSDLEDGVESITSDSKLKKSMKSRHVVMMSLGTGIGTGLLVANAKGLHYGGPAALIIGYILVSFETYFMIQAAGEMAVTYPTLPANFNAYSSIFISKSFGFATVWLYCFQWLTVLPLELITASMTIQFGNDKINPDIYILIFYVFLVFIHFFGVKAYGETEFIFNCCKILMIAGFIILSIVINCGGAGNDGYIGATYWHNPGAFAGDTSIGRFKNVCYILVTAYFSFGGMELFALSVQEQSNPRKSTPVAAKRSIYRIVVIYLLTMILIGFNVPYNDDQLMGAGGSATHASPYVLAASIHGVKIVPHIINAVILISVVSVANSSLYAGPRLICSLAQQGYAPKFLDYVDREGRPLRALIVCCVFGVIAFVAASSKEEIVFTWLAAIAGLSELFTWTSIMLSHLRFRQAMKVQGRSLDELGYKATTGIWGSIYGVFFNILVFVAQFWVALAPLGNGGKCDAESFFQNYLAFPIWLAFYFGYMVYNRDFTLLNPLDKIDLDFHRRIYDPELMRQEDEENKEKLRNMSLMRKAYHFWC

SEQ ID NO: 51 - DNA, 4437 bp, Saccharomyces cerevisiae
atgccctttttgaggaaaatagcggggacagcacatacacattctaggtctgattcgaactcatctgtgaaattcggccatcagccgactagttcggtagcatcaaccaaaagttcaagcaaaagccctcgtgcaacatctcgcaaaagcatttatgatgatattagaagccaatttcccaacctaacccccaactctacctcttctcagttttacgaaagcacgccagttatcgaacaatcctttaattggacgacagatgaccacatctcagctggaacgcttgaaaacccaacgagctttacaaacagttcttataaaaatgacaatggacctagtagcctctctgattcgaggaaatcctccggtggcaatagcgtaaatagtttgtcctttgacaagctaattctatcgtgggatcctacagaccctgatgaatggacaatgcatcgcgtcacctcatggtttaaatttcatgattttccagaatcctggatattgtttttcaaaaagcatcaattgtttggtcacagatttataaagttgcttgcatatgataatttcgctgtttatgaaaagtatttgccgcagactaaaactgcttcatataccaggtttcagcagttattgaaaaaaacaatgaccaagaacgtaacaaatagccatattcgtcagaagagcgctagcaaacttaaaagttccaggtcttccagcgaatcgatcaaatcaaaattaaaaaatagtaaatcgcaagaggatatttcaaattctagatcaacgtcagaatctgcattgagcccaacaaaatcgggcccttccaagaccgatgaaaagaattttttacattctacttcaacacaccaaaaaaccaaaagcgcaagttcactatacagaagaagttttatatccctaagaggctcatcatcgagcaatgcttcctcagcaaaatcaccttcaaacatcaagttaagtataccggctcggccgcactcaattattgaatctaacagtacacttaccaaatcggcgagcccacctgcatctccttcgtatcctagcatatttagaagacatcacaaaagtagttcatctgagtcgtcattattaaattccctttttggtagtggaataggcgaggaagctccaacaaagcctaatccacaaggtcatagtctgtctagtgaaaatttagctaaaggaaaatctaaacactatgaaactaatgtgtcttcacctttaaaacaatcttcactacccacttcggatgataaaggtaatttatggaataaattcaaaagaaagagccaaataggggttcctagcccaaatacggtagcttatgtaacgtctcaagaaactccatccttaaaatcgaattcgagtactgctaccttaaccgtacaaacggcagatgtaaatataccatctccatcttcatcaccaccgccaatacccaaaactgcaaacagaagtttggaggtcatcagcacagaagatacacctaaaatttcttcaaccacggcgtcttttaaagaaacgtatcctgattgtattaatccagacaagacagttccagtgccggtaaataatcaaaagtatagtgtaaagaactttttactggaccaaaaattttatcctctgaagaaaacagggttaaatgatagtgagaataaatatattctggttaccaaagataatgttagttttgttccgctaaacttaaaaagtgtagcaaaattatccagtttcaaagaatctgctctcacaaaattgggaatcaatcacaaaaatgtcactttccatatgacagactttgattgcgatattggtgctgcaattccagatgatactttggaatttttgaaaaaaagcttgtttttgaacacttctggaaaaatttatatcaaagaccaaatgaagcttcaacaaaaaccgaaacctgctcctctcacctcagaaaacaatgttcctttaaaatcggtgaaaagtaagagttcaatgaggtccggaacaagcagtctgatagcatcgacagatgatgtttccattgtcacttcgtcttctgacataacatcatttgatgaacatgcatcaggaagtgggcgcaggtacccccaaaccccgagttattactatgacagagtttccaatactaatccaactgaagaattgaattattggaatattaaagaagttctttctcatgaggaaaatgcaccaaaaatggtttttaaaacaagtccaaaattagaactcaacctaccagataaaggaagtaaattaaatattcctacccccataacagaaaatgaaagcaagagtagttttcaagtgctaagaaaagatgaggggactgaaattgatttcaatcatcgtagggaatcgccttatacaaaaccagaactggcaccaaaaagagaagctcccaagcctcccgcaaatacttctcctcagaggaccttatcaacttctaaacagaataaaccgatccgcctagtgagggcaagtacaaaaatttcgagaagcaaaagatcgaaaccattgccgccacaattattatcatctcctatagaagctagcagctcgtctcctgattcgcttacttcctcatatactcctgcttcgactcatgttttgataccgcaaccttataagggtgcaaacgatgttatgcgtaggttgaaaacagaccaggactcgacgagtacttccccatctttgaaaatgaaacagaaagtgaatcgctcaaattcaactgtatcgacttcaaattcaattttctattctccttcaccattgttaaaaagaggtaactcaaaaagagttgtttcgtcgacatctgcggccgatatatttgaagagaatgacataacattcgcggatgctccgccgatgtttgacagcgatgatagtgatgacgattctagttcatccgatgacattatctggtccaagaaaaaaacagctcctgagactaataatgaaaacaaaaaggatgagaaaagcgataacagttctacgcattctgacgaaatattctatgattctcaaacgcaggacaaaatggagagaaagatgacctttagaccatctccggaggtcgtttatcaaaatttagagaaattcttcccaagggctaacttagataagccaatcactgaaggaatagcttcaccaacatctccgaaatccttagacagcctactttcaccaaagaatgtggcttcatcgagaactgagccaagcactccttcccgtcccgtccctcctgatagctcatacgagttcatacaggatggacttaacggtaaaaataaaccattgaatcaagctaagacacctaaaagaacaaaaaccataagaaccattgcacatgaagctagtttagcaagaaaaaactctgtaaaactaaaaagacagaacaccaaaatgtggggtacaagaatggtcgaagtgaccgaaaaccatatggtgtcaattaataaagccaaaaattcgaaaggtgagtataaggaattcgcctggatgaagggtgaaatgatagggaagggatctttcggtgctgtttatttatgtttaaacgttactacaggtgagatgatggccgttaagcaggttgaggtccccaagtatagctcacaaaatgaagccattctaagtaccgtggaagcattaagatctgaagtgtccacgttaaaagatttagatcatcttaatattgttcaatacttaggttttgagaataaaaacaatatttacagtttgtttttagaatatgttgctggtggctccgtgggatccttgattagaatgtatggaagattcgatgaaccgttgatcaaacatttaacaacacaagtattaaaaggattggcatacctacactcgaaaggtattctccacagggatatgaaggcagacaacttacttttggatcaagatggtatctgcaaaatcagtgacttcggaatttcaagaaaatcaaaggacatatactctaattcggatatgaccatgcgaggaacagtcttctggatggctcctgaaatggttgatacaaagcaaggctacagtgcaaaagttgatatatggtctctgggatgcatcgttctggaaatgtttgctggtaagcgcccgtggtccaacttagaagtcgtcgcagccatgttcaaaattggaaagtcaaaatcggcaccaccaattcctgaggacactttaccattgatatcgcaaatcggacgaaattttctggacgcatgcttcgagataaatccagagaaaaggccaaccgctaacgagcttctttctcatccttttagtgaagtaaatgaaacattcaatttcaaatctaccagactcgcgaagtttataaagtcaaatgataagttaaactcttcaaaattaaggataacctctcaggagaataaaactgaatag

SEQ ID NO: 52 - protein, 1478 aa, Saccharomyces cerevisiae
MPFLRKIAGTAHTHSRSDSNSSVKFGHQPTSSVASTKSSSKSPRATSRKSIYDDIRSQFPNLTPNSTSSQFYESTPVIEQSFNWTTDDHISAGTLENPTSFTNSSYKNDNGPSSLSDSRKSSGGNSVNSLSFDKLILSWDPTDPDEWTMHRVTSWFKFHDFPESWILFFKKHQLFGHRFIKLLAYDNFAVYEKYLPQTKTASYTRFQQLLKKTMTKNVTNSHIRQKSASKLKSSRSSSESIKSKLKNSKSQEDISNSRSTSESALSPTKSGPSKTDEKNFLHSTSTHQKTKSASSLYRRSFISLRGSSSSNASSAKSPSNIKLSIPARPHSIIESNSTLTKSASPPASPSYPSIFRRHHKSSSSESSLLNSLFGSGIGEEAPTKPNPQGHSLSSENLAKGKSKHYETNVSSPLKQSSLPTSDDKGNLWNKFKRKSQIGVPSPNTVAYVTSQETPSLKSNSSTATLTVQTADVNIPSPSSSPPPIPKTANRSLEVISTEDTPKISSTTASFKETYPDCINPDKTVPVPVNNQKYSVKNFLLDQKFYPLKKTGLNDSENKYILVTKDNVSFVPLNLKSVAKLSSFKESALTKLGINHKNVTFHMTDFDCDIGAAIPDDTLEFLKKSLFLNTSGKIYIKDQMKLQQKPKPAPLTSENNVPLKSVKSKSSMRSGTSSLIASTDDVSIVTSSSDITSFDEHASGSGRRYPQTPSYYYDRVSNTNPTEELNYWNIKEVLSHEENAPKMVFKTSPKLELNLPDKGSKLNIPTPITENESKSSFQVLRKDEGTEIDFNHRRESPYTKPELAPKREAPKPPANTSPQRTLSTSKQNKPIRLVRASTKISRSKRSKPLPPQLLSSPIEASSSSPDSLTSSYTPASTHVLIPQPYKGANDVMRRLKTDQDSTSTSPSLKMKQKVNRSNSTVSTSNSIFYSPSPLLKRGNSKRVVSSTSAADIFEENDITFADAPPMFDSDDSDDDSSSSDDIIWSKKKTAPETNNENKKDEKSDNSSTHSDEIFYDSQTQDKMERKMTFRPSPEVVYQNLEKFFPRANLDKPITEGIASPTSPKSLDSLLSPKNVASSRTEPSTPSRPVPPDSSYEFIQDGLNGKNKPLNQAKTPKRTKTIRTIAHEASLARKNSVKLKRQNTKMWGTRMVEVTENHMVSINKAKNSKGEYKEFAWMKGEMIGKGSFGAVYLCLNVTTGEMMAVKQVEVPKYSSQNEAILSTVEALRSEVSTLKDLDHLNIVQYLGFENKNNIYSLFLEYVAGGSVGSLIRMYGRFDEPLIKHLTTQVLKGLAYLHSKGILHRDMKADNLLLDQDGICKISDFGISRKSKDIYSNSDMTMRGTVFWMAPEMVDTKQGYSAKVDIWSLGCIVLEMFAGKRPWSNLEVVAAMFKIGKSKSAPPIPEDTLPLISQIGRNFLDACFEINPEKRPTANELLSHPFSEVNETFNFKSTRLAKFIKSNDKLNSSKLRITSQENKTE

SEQ ID NO: 53 - DNA, 1251 bp, Saccharomyces cerevisiae
atggtatcttctttgcccaaggaatcgcaagccgaattgcaactgttccagaacgaaatcaacgccgctaatccgtccgactttcttcagttctccgccaactatttcaataaaaggctggaacaacagagagcgttcctcaaggccagggagcctgaatttaaggcaaagaacattgttctatttccggaaccagaggagtcattttccagacctcaatcagctcaatctcaatcaagatccagatcgagtgttatgttcaaatccccctttgtgaacgaggacccacactccaacgtgtttaaaagtgggtttaatttagacccgcacgaacaggacactcaccagcaagcacaggaagaacaacagcatactagagaaaagacatcaactcctccactcccaatgcacttcaacgcccaaaggcgtacttctgttagtggtgagaccttacaaccaaacaattttgacgattggactccagatcactataaggaaaagtccgagcagcaattgcaaagactggaaaaatcgatccgtaataactttctgttcaacaagctggattccgactcaaaaaggctggtcataaattgtctggaggagaagtccgtccccaaaggtgctacgataatcaagcaaggtgaccaaggggactacttctatgtcgtcgaaaagggtactgttgacttctacgtcaacgacaacaaggtcaactcttccgggccaggctccagtttcggggaacttgctcttatgtacaacagccctcgtgctgccaccgttgtagcaacctccgactgtttgttgtgggctctagacaggctcaccttcagaaaaatacttttgggcagctctttcaagaagagactcatgtatgacgatcttttgaagagcatgccagttttgaagagtttgactacgtacgaccgtgccaaacttgccgatgcactggataccaagatctaccagccgggtgaaacaatcattcgcgagggtgatcaaggggagaacttttatttaattgagtacggagctgtggacgtctctaagaagggccaaggtgtcataaataaactgaaagaccatgattatttcggtgaagtggccttgctaaacgatttgcccagacaggccactgtgactgctacaaagagaaccaaagttgccacattggggaaaagtggttttcaacgtttactgggtcctgcagtagacgtattaaagctcaatgatcctacaagacattaa

SEQ ID NO: 54 - protein, 416 aa, Saccharomyces cerevisiae
MVSSLPKESQAELQLFQNEINAANPSDFLQFSANYFNKRLEQQRAFLKAREPEFKAKNIVLFPEPEESFSRPQSAQSQSRSRSSVMFKSPFVNEDPHSNVFKSGFNLDPHEQDTHQQAQEEQQHTREKTSTPPLPMHFNAQRRTSVSGETLQPNNFDDWTPDHYKEKSEQQLQRLEKSIRNNFLFNKLDSDSKRLVINCLEEKSVPKGATIIKQGDQGDYFYVVEKGTVDFYVNDNKVNSSGPGSSFGELALMYNSPRAATVVATSDCLLWALDRLTFRKILLGSSFKKRLMYDDLLKSMPVLKSLTTYDRAKLADALDTKIYQPGETIIREGDQGENFYLIEYGAVDVSKKGQGVINKLKDHDYFGEVALLNDLPRQATVTATKRTKVATLGKSGFQRLLGPAVDVLKLNDPTRH

SEQ ID NO: 55 - DNA, 6504 bp, Saccharomyces cerevisiae
atgaaaggtcttctctggtctaagaacaggaaatcttcaacggccagtgctagttcaagctcaacttccacgtctcataagacaactactgcgtctacagcatcgtcgtcgtcgccgtcatcatcctctcaaactattcgaaactcgacaagcggtgcttctccatacatgcattcccaccatcaccatggccagggacacagtcaccacagaggggaagacaacaacagagataagagaaaaagctccgtatttccaccctccaagcagtacacatccactagttccagtcaggtgaacttggggatgtatcattcggatactaacaccagatcttctagaagcatagcctctacgctaaaagacgattctccgtctgtctgctccgaagatgaaataagcaattcttctagccagaagtccaatgcccaggatgagactcccattgcgtacaagaagagtgcccattcgaaagactcattgttgccttcacgttcctcgtctttatcacctcctcagtctcgatgtagcactggaactacgctagagaaatcgttgaacacttcaggtatcagtaacagtagcggcactaataataacaatagcaataataacaacgataacgagcaaaagcaaagaaatgttatccacttaaactctgaaaactatgatacaactgtttttaagactggatgggttaataagtcccatggccagactgttgctacaaactataatagctcaatgacagccccttcctcttcctcttcgtcctcctctcagaatctccgtaatgatgcgtattctagaaacagggaaagcaggttttatgggaacgacggttcgtctttaaaaaatgatgacagcagtagtactacggccactaacagtggcaatgatgtggcctcagcaagaagcagcatggctatagatcctcaaatgctagtacctgattaccgtctttatagggctcaattgaaaggttgcgttctcaacctttacaaaagtggtttgaatagtaacattaagttttttgatccaactttaccagcttcaaatagtagtatagcaaatgaaaaccatcaacagaaaaaacaacaaacaaacaaccaagcacaagcggaagctctgcaccaaaagcaatcatttggccaaatgggtgaacctattacactggacctgaagtatttatctgaagtttacccgcacccagatttaagacaagacagtgatggtaaaattatatcaggcacaatagaaagtttatgtcacacagtcttattttaccccggtccaaagcaatcggacgtacctaatgagaaatcattatctaagacacatagagctgttattaatctgttattgatgtttccattactagatcatttcattaagtttctaaaggtattcaaccaattcggtctttcttttaccaagaataaatcaagattgacaaataattccacacaattctacaacatatcccctgctgtcgatgactccatgactcaaagattagctttaactgctaaaacaatccttgatgtatttccgggatttttgctggatgaaccaatgctgaagactataatttccttattagatactatatctttgcataacgatgaaatttccaacaatttgaaaattaaaatcgccaataaacataacgaattaatgaaacttaccgcattcactcgatctcttccaatggcaacatcatctacacatgaattagagattatattggatccaagtcatttcctgtctttagacattacaacattggctgatgaagttcatcatatcaatttaaagtttgataaagtatgggcaccgaaatttgactattctctgctgtatgattcgaagtttattaatcgaagaattgtctcgttaaatccattggtattcaacaacgaccaaaatatccattttcttggaaggctactaatatcacatttatttccaacaaatcctgagtttagtaaaaaagtgactccaaaagtgagagctgagttattagataaatgggtccaaattggctgtagatttgaacatttaggagacatggtatcatggctagctgtcgccactatcatttgttcaattcctgtactaaggtcatcttcatggaaatatgttcctgatcagtcattgaaaactatttttaaagattgggttcctaccattattcagttagagaggcgacaaaggacatctaaatctacaagtagtgttttcatactcgctcctccaaatctggatgacgactttacgagagctaacgtgatttcttattttggcgatttattaattcatgctgatgatttaccatctgatacgaaattcaagtacttggaaaagaaaattaacagaacaaaaaacgcttttcataaatggcaacaaagattacaagcaatcgactctacgagacataaaactaattcgacagaaaacgtcagggataatgattctcctaataacgttgtttatcagctctggaaatttcatttatcacaacctccgttgaacattgaaggaataatgaaattaagtgtccaacacgaacctccaataatcgaccagaaagcgtattctactattggttctcaaaggagtgctttagtaactggaagttatttacccattttattcaatgaactattcccaaattattcactatttcctaagaatacattagtgggtgctgccagtgatgcgaagttgccgcctccaagatcatccgcgcgcctctcaaaatcactttcaatcagtgaaccaattccaatagcttcaaacagtcacactatgggctcattaacagatgatgctatgtcctcaaaaaatgataataataaagttacaggtgttggaaaaattgacggacctgtgatcaaagagatgtcgtcaaaacaatcaaataaacagagactattaaaatctgtgagagatgtttttaatattgacatggatgtgtttcatatatcagatgagttagtatttaaatcggtatacgataatgatggtaaatcccgtcctgctagtatggtcatagaaacaccaaagagattctcacaacactcttccatgcttattaataatccagctactccaaaccaaaagatgagagattccttggataccactggaagactaagtaagacattagaaaatatggactttttcaacaatattggtcaagtatcagattcactaaaagaatcgattattcgtgtcgtattgaaatcgtcgtcgctagaaaagatttttgatttactggtattaacttcaaatatcttttcaaaattggtagacactaaagaccttgagaattattactatcatcaaagacaaaggggtcattctaccagagggctttccgatgataacataggactactagattatgcattcgttaaactaactatggacaatgatattttcacagaaacattcttcaacacttataaaagctttactactacaactacggtattagaaaatatggcaaaacggtatgttggtgcaaagagttgcagcgtgtcaatttccaagattttagatcgcagtgatgattctaaaatgaagataaatgaggatacaaatttagtgtcctcttcattatacgaccaaaattttcctgtttgggatatgaaagtaactgacgatgaaaacataaaccttatttatatggcaaaaatccaaatcggcgccgcggaagctatactacatttagtgaaaaatcattactctgactttactgacgatttatgtaacaactctactctattggatattataaaaataatggaacaagaagtatccactgaatggcctacgcgaattgcaaactcaaagttacaaaaaagcctaccagaaaattttgtgattgaaacagaaaatttgttgactacgttaactgatctatttcatggtattaaatcagcataccaaaagcaactatacagacctattggtgtcaatagaactcagaagagaataactgacattttgaattcctttaacacattctcttttacagatcttaacaacatcattgatgatccttcctttagcgatgacatgattagatcttttcaaaagttacactcaaccaattacgaagatatactagaatggatctaccagttagataactttatttctaagaagttcaatttagtttctaagaaagattggatagttcttttccaggagttggaattgctttcaaaggaatctctggtctcttttttcaattatccgctacattttaagtcaagcaaattgataaaccccggatatttgcaattgcacgagtttgaaatttccaatctttttacttggatttctacattgattcttaaggatgataatggtacggagagtcttttttttgaaaaactaccacaatctataaaattgttaataaagttacacacgagtctaactacgtttttcgtgatggaaatttcaaacgtcaacaaaagcagtagtgaaaggttaactacttgtaaagttatattacaaattttgaactacatccgctggaaaaacggaagtttggatttatttgattcagaggaggatgaaagtcctcatgctatttgtccacacattccagcttttattgaaactgctattgcgcatgccataatatcaccagagtctagaaactatgaactttcgtggatcaaagcttctgaaaaactttcggaccctactaaaggaacccaaaatctaagatcgattagtaacgttttagagaagatagatgacatacatataaagagattcattgagattgatgatgtattcagcaaaaactgcaagaatttatgcccctgccctggttggttcatttcaaggttactagaaatatctcagtttgtccctaacatgagtatcactaattcgaaacttattaattttgacaaaaggagatttgttaacaacataatatctaatgtcttggatttaattccgaacgaaagggagtttccacttgatattgaaatgagtgacgaaaatccttcgaaaagaactacatttggccgcattctgttcaataattttgaagatgttaataaagtatacagaaagaagactaaaaaagtatcagaatcagaagccatatcggagagatttcaagagcagggagtatttaatgaaatactagtcaatgaaattgaaaaaataaagagggaagccagaaaattagaggttttactcgatcaagaaaagatcttgaagaactctgctgctttacatcaggccgttccgaaaaagaataggaagtctgttattatctcaggtactcatagtgacaacgatcatagctataatatcaataagaacaccggtcaaacgccttctctaggtagtgttatggaaagcaataattcagcaaggaatagaagagattcaagggcctccttttccacaaatagatcatcagtagtgtcaaattccagccataatggtgttagtaaaaaaataggtggatttttcagaagaccattttcaatcggtggattcaacacatccagttctaattattcactcaacagtatattatcgcaagaagtttcaagtaacaaatccattctaccaagtatacttccagaggttgattccatgcaactacacgacttaaaacctagttatagtttgaagacctttgaaatcaagtcaataatggaaataatcaatcacagaaacattccggcttactactatgcgttcaagatagttatgcaaaatggccatgaatatctgattcaaacggctagttctagtgacctcacagaatggataaaaatgatcaaggcttccaagagattttcattccattcgaaaaaatataaaggtaaaactcataataagatatttggggtaccattagaagacgtttgtgaaagagagaataccttgatacctacaattgttgtgaaattgctggaagagattgagctgcgtgggctagatgaagtgggattgtacagaattcctggttccatcggcagtataaatgcactaaagaacgcatttgacgaagaaggtgcaacagataattcctttacattagaggacgatagatggtttgaagtgaatgcgatcgcaggctgttttaagatgtatttaagagagttaccagattctttattttctcatgctatggtgaacgactttaccgatttggcgattaagtataaagcacatgcaatggtaaatgaagaatacaagagaatgatgaatgagttactccaaaagttacctacatgctattaccaaactttgaaaagaattgtatttcatttgaataaagtacatcagcatgttgtaaataataaaatggacgcatcaaacttggctattgtattttccatgagttttataaaccaagaagacttagccaacagcatggggtccagattaggtgcagttcagacaatcctgcaagattttattaagaatccaaatgattatttcaagcaataa

SEQ ID NO: 56 - protein, 2167 aa, Saccharomyces cerevisiae
MKGLLWSKNRKSSTASASSSSTSTSHKTTTASTASSSSPSSSSQTIRNSTSGASPYMHSHHHHGQGHSHHRGEDNNRDKRKSSVFPPSKQYTSTSSSQVNLGMYHSDTNTRSSRSIASTLKDDSPSVCSEDEISNSSSQKSNAQDETPIAYKKSAHSKDSLLPSRSSSLSPPQSRCSTGTTLEKSLNTSGISNSSGTNNNNSNNNNDNEQKQRNVIHLNSENYDTTVFKTGWVNKSHGQTVATNYNSSMTAPSSSSSSSSQNLRNDAYSRNRESRFYGNDGSSLKNDDSSSTTATNSGNDVASARSSMAIDPQMLVPDYRLYRAQLKGCVLNLYKSGLNSNIKFFDPTLPASNSSIANENHQQKKQQTNNQAQAEALHQKQSFGQMGEPITLDLKYLSEVYPHPDLRQDSDGKIISGTIESLCHTVLFYPGPKQSDVPNEKSLSKTHRAVINLLLMFPLLDHFIKFLKVFNQFGLSFTKNKSRLTNNSTQFYNISPAVDDSMTQRLALTAKTILDVFPGFLLDEPMLKTIISLLDTISLHNDEISNNLKIKIANKHNELMKLTAFTRSLPMATSSTHELEIILDPSHFLSLDITTLADEVHHINLKFDKVWAPKFDYSLLYDSKFINRRIVSLNPLVFNNDQNIHFLGRLLISHLFPTNPEFSKKVTPKVRAELLDKWVQIGCRFEHLGDMVSWLAVATIICSIPVLRSSSWKYVPDQSLKTIFKDWVPTIIQLERRQRTSKSTSSVFILAPPNLDDDFTRANVISYFGDLLIHADDLPSDTKFKYLEKKINRTKNAFHKWQQRLQAIDSTRHKTNSTENVRDNDSPNNVVYQLWKFHLSQPPLNIEGIMKLSVQHEPPIIDQKAYSTIGSQRSALVTGSYLPILFNELFPNYSLFPKNTLVGAASDAKLPPPRSSARLSKSLSISEPIPIASNSHTMGSLTDDAMSSKNDNNKVTGVGKIDGPVIKEMSSKQSNKQRLLKSVRDVFNIDMDVFHISDELVFKSVYDNDGKSRPASMVIETPKRFSQHSSMLINNPATPNQKMRDSLDTTGRLSKTLENMDFFNNIGQVSDSLKESIIRVVLKSSSLEKIFDLLVLTSNIFSKLVDTKDLENYYYHQRQRGHSTRGLSDDNIGLLDYAFVKLTMDNDIFTETFFNTYKSFTTTTTVLENMAKRYVGAKSCSVSISKILDRSDDSKMKINEDTNLVSSSLYDQNFPVWDMKVTDDENINLIYMAKIQIGAAEAILHLVKNHYSDFTDDLCNNSTLLDIIKIMEQEVSTEWPTRIANSKLQKSLPENFVIETENLLTTLTDLFHGIKSAYQKQLYRPIGVNRTQKRITDILNSFNTFSFTDLNNIIDDPSFSDDMIRSFQKLHSTNYEDILEWIYQLDNFISKKFNLVSKKDWIVLFQELELLSKESLVSFFNYPLHFKSSKLINPGYLQLHEFEISNLFTWISTLILKDDNGTESLFFEKLPQSIKLLIKLHTSLTTFFVMEISNVNKSSSERLTTCKVILQILNYIRWKNGSLDLFDSEEDESPHAICPHIPAFIETAIAHAIISPESRNYELSWIKASEKLSDPTKGTQNLRSISNVLEKIDDIHIKRFIEIDDVFSKNCKNLCPCPGWFISRLLEISQFVPNMSITNSKLINFDKRRFVNNIISNVLDLIPNEREFPLDIEMSDENPSKRTTFGRILFNNFEDVNKVYRKKTKKVSESEAISERFQEQGVFNEILVNEIEKIKREARKLEVLLDQEKILKNSAALHQAVPKKNRKSVIISGTHSDNDHSYNINKNTGQTPSLGSVMESNNSARNRRDSRASFSTNRSSVVSNSSHNGVSKKIGGFFRRPFSIGGFNTSSSNYSLNSILSQEVSSNKSILPSILPEVDSMQLHDLKPSYSLKTFEIKSIMEIINHRNIPAYYYAFKIVMQNGHEYLIQTASSSDLTEWIKMIKASKRFSFHSKKYKGKTHNKIFGVPLEDVCERENTLIPTIVVKLLEEIELRGLDEVGLYRIPGSIGSINALKNAFDEEGATDNSFTLEDDRWFEVNAIAGCFKMYLRELPDSLFSHAMVNDFTDLAIKYKAHAMVNEEYKRMMNELLQKLPTCYYQTLKRIVFHLNKVHQHVVNNKMDASNLAIVFSMSFINQEDLANSMGSRLGAVQTILQDFIKNPNDYFKQ

SEQ ID NO: 57 - DNA, 942 bp, Saccharomyces cerevisiae
atgcgtttctctactacactcgctactgcagctactgcgctatttttcacagcctcccaagtttcagctattggtgaactagcctttaacttgggtgtcaagaacaacgatggtacttgtaagtccacttccgactatgaaaccgaattacaagctttgaagagctacacttccaccgtcaaagtttacgctgcctcagattgtaacactttgcaaaacttaggtcctgctgctgaagctgagggatttactatctttgtcggtgtttggccaacagacgacagtcattacgctgctgaaaaggctgctttgcaaacctatttgccaaaaattaaagaatccactgttgctggtttcttggttggttctgaagccttataccgtaacgatttgactgcctctcaattatcagacaaaattaatgacgtccgtagtgtcgttgctgacatttccgattctgacggaaagtcatactctggtaagcaagtcggtactgtcgattcctggaatgttttggttgctggttacaattctgccgttatcgaagcttccgattttgttatggctaacgcgttctcctactggcaaggtcaaaccatgcaaaatgcctcttactcattctttgatgatattatgcaagctctacaggttatccaatctactaaaggttctaccgatattaccttctgggttggtgagaccggttggccaactgatggtaccaactttgaaagttcttacccatctgttgacaacgccaaacaattctggaaagaaggtatctgttccatgagagcttggggtgttaacgttattgtttttgaagcctttgatgaagattggaagccaaacacctctggtacctctgatgtcgagaagcactggggtgttttcacttcaagtgacaatttgaaatactccttggactgtgacttttcatga

SEQ ID NO: 58 - protein, 313 aa, Saccharomyces cerevisiae
MRFSTTLATAATALFFTASQVSAIGELAFNLGVKNNDGTCKSTSDYETELQALKSYTSTVKVYAASDCNTLQNLGPAAEAEGFTIFVGVWPTDDSHYAAEKAALQTYLPKIKESTVAGFLVGSEALYRNDLTASQLSDKINDVRSVVADISDSDGKSYSGKQVGTVDSWNVLVAGYNSAVIEASDFVMANAFSYWQGQTMQNASYSFFDDIMQALQVIQSTKGSTDITFWVGETGWPTDGTNFESSYPSVDNAKQFWKEGICSMRAWGVNVIVFEAFDEDWKPNTSGTSDVEKHWGVFTSSDNLKYSLDCDFS

SEQ ID NO: 59 - DNA, 4302 bp, Saccharomyces cerevisiae
atggcaaataataattctgatcgacaaggtttggaacccagagtcattagaactctgggttcacaagcgcttagcggtcctagcatatctaatagaacttcaagttcggaggcaaaccctcatttttccaagaacgtgaaggaagcaatgatcaagacagcttctccgactcctttatctacacctatttacaggatagctcaagcttgtgacaggtgtcgatctaagaaaacaaggtgcgatggaaaaagaccacagtgttcgcagtgtgctgctgtcggatttgaatgcagaataagcgataaattactgaggaaagcgtatccaaaagggtacacagaaagcctggaagaaagagtacgcgaactggaggcagagaataagcgtttgctagctttgtgtgatatcaaagaacagcaaataagccttgtttcacagtcgcgaccacagacatcaacggataataccataaatggcaatttcaaacatgatttgaaagatgctccattgaatctgtcttctacaaatatctatttattaaatcaaacggttaataagcagctacaaaatggcaaaatggatggtgataatagcggttctgcaatgagtccattgggggcaccacctccaccgccacacaaagaccatctttgtgacggcgtttcctgtacaaatcatttacacgtcaagcctacttctacgagtttaaacgatccaaccgctatatcttttgaacaggacgaggcacctggtcttcctgcggtaaaggcattaaaatcaatgacgactcatcaacgtagcactcaattggcaactttagtttctttatccatcccaagatctactgaagaaattctgtttattcctcagcttttaactaggataagacaaatatttggtttcaactcaaagcaatgtttgtatacggtttcattattatcttcattgaaaaatagattgccagcaccacggcttctagcaccttcaacatcaaccaagttaaaggagaaagatgaagataaaaaacttgatgatgattcggcttttgtgaaaaggtttcaaagcacaaacctctccgagtttgtcgatttgaaaaagtttttaatttctttgaaatttaacattaactcgttttcaaagcaatcagaaaagccggctaatgatcaggatgatgaactactttccctcactgaaattaaagagcttttacacctttttttcaaattttggtctaatcaggtaccaattctaaacaatgaccacttcttaatatatttcaacaattttgttgaagtcgtgaagcatttatctacagaaaatttggagacgaataacactactaaaagtacagtcaccactaatcatgaaatatttgccctaaagcttctgatgatgttacaaatggggttactcgttaagattaaaatggaaaaaataaaatacactgtaccgaagaatccgaaggccaaatatgctagattgatggcatattatcatcagctttccctaataattcctaaaaatccttattttttaaatatgtccacaacttcattaccatccttacaattgttatctttggcatccttttattatttaaacgtgggtgatatttcggcaatctatggggtaagaggccgtattgtttctatggcacaacaattgagacttcacagatgtcctagtgccgtattaagtgtacactctaacccagttctacaaaaatttgagcaaagcgagaggagattactgttttgggcaatttattacgttgacgtttttgcctcattgcaacttggtgttcctcgtttacttaaggattttgatattgaatgtgcattaccaatttctgatgttgagtataaggatcagttatctatggaaaatgaaaaagcagataaaaaagctaaaaagattcaactgcaaggtcaagtttcaagcttttcattgcagataatcagatttgcgaaaatattaggtaacattctagactcgatttttaagagaggaatgatggatgaacgtataacttctgaagttgcattagtacatgaaaacgcactggataactggagaaatcaacttcccgaaatgtactactttcaaataactgtaaacggaactgtgaatttagacgagattagagcaaccaatcaaagaaatactgagaccaaatttgataagaaagacataatattatttgaaaagaagattctattgctgttttatttcttggccaaatctatgatacatttaccggttattgcaaccaaacctttgcctaagaatgttgataatgccacaaagaagaaacagtcaatgttcaacaacgactctaaaggcgcaaccaaccaggaccacatgatattagatgttgatatgacttctcctgctataaggacatcatcctcatatatcattttacaacaagctaccaatgcaacgcttacgattttccaggccattaattccatgtatttacctttgccattgaatgtatcaagaacgttaatcagattttctttgctctgtgctagaggttctttggaatataccaaaggtggtgcgttattcttagataataaaaatcttctcctcgacaccatcaaagatatcgaaaacgataggcttttggatttacctggaattgcctcttggcacacgctgaaactgtttgacatgagcatcaacctgttgttgaaagcacctaatgttaaggttgaaagactggataaattcttggaaaagaaattgaattactacaatagattgatggggttaccaccggccacaaccacatccttaaaaccattatttggctctcaatcgaagaacagcctggaaaatagacaaagaacacctaatgtcaaaagagaaaacccagaacacgagtatctttatggaaacgatagtaataataacaataattctgaagcgggtcactctccaatgacaaatacaactaatggtaataagagattaaagtatgaaaaagatgcaaaacgaaatgcaaaagatggcggtatatccaagggggagaacgcacataatttccagaatgataccaaaaaaaacatgtccaccagcaatctgtttccattttcgtttagtaatacagaccttactgcgctgttcacccatcctgaaggaccgaattgtacgaatactaataatggcaacgtggatgtgtgtaacagagcttctacagatgccacggatgccaatatagagaacttaagctttttaaatatggcaccattcttacagaccggtaactccaatataggtcaaaacacgattgagaataagcctatgcacatggatgcgatattcagtctaccaagtaatttagatctaatgaaggataatatggactctaaaccggaacaattagaacccgttattaagcaaaaccctgagaattcaaaaaacaaccaatttcatcagaaaggaaaaagtacgaatatggaaaagaataatctctctttcaacaacaagagtaactacagcctaacaaagctaatgagattgctgaacaacgataattctttctcgaatattagtattaacaactttttataccaaaatgatcagaactccgcgtcagcggatccgggaacaaataaaaaagccgttacaaatgcaggtgccaacttcaaaccaccttcaactggcagtaataccagccaaggcagtatccttggaagtacaaagcatggaatggacaactgtgatttcaacgatttaggtaattttaacaatttcatgacaaatgtcaattattctggggtcgactatgattacattgtagatgcatcacttgggttggctcctttattagtggatacgcccgatatctcaaataccaacacgacgtctactacgtcaaatcgaagtaaaaacagcatcatcctagatacgacatttaacgatgacttggatcggtcacgcatgaatgccagagaagtattgaatcctaccgactcaattttaagtcaagggatggtatcctccgtaagtacgagaaataccagcaatcaaagatctctttcatcgggcaatgattcaaaaggtgacagtagttctcaagagaactcaaagagtgcaactggcaaccagttggatacaccttctacactgtttcaaatgagaaggacctcttcagggccctcggcgtcccaccgtggtccaagacggcctcagaaaaatcgttacaatacagatcgatcaaaaagttctggtggcggaagttccaacacagataatgtatctgatttattccaatggcaaaacgccaaataa

SEQ ID NO: 60 - protein, 1433 aa, Saccharomyces cerevisiae
MANNNSDRQGLEPRVIRTLGSQALSGPSISNRTSSSEANPHFSKNVKEAMIKTASPTPLSTPIYRIAQACDRCRSKKTRCDGKRPQCSQCAAVGFECRISDKLLRKAYPKGYTESLEERVRELEAENKRLLALCDIKEQQISLVSQSRPQTSTDNTINGNFKHDLKDAPLNLSSTNIYLLNQTVNKQLQNGKMDGDNSGSAMSPLGAPPPPPHKDHLCDGVSCTNHLHVKPTSTSLNDPTAISFEQDEAPGLPAVKALKSMTTHQRSTQLATLVSLSIPRSTEEILFIPQLLTRIRQIFGFNSKQCLYTVSLLSSLKNRLPAPRLLAPSTSTKLKEKDEDKKLDDDSAFVKRFQSTNLSEFVDLKKFLISLKFNINSFSKQSEKPANDQDDELLSLTEIKELLHLFFKFWSNQVPILNNDHFLIYFNNFVEVVKHLSTENLETNNTTKSTVTTNHEIFALKLLMMLQMGLLVKIKMEKIKYTVPKNPKAKYARLMAYYHQLSLIIPKNPYFLNMSTTSLPSLQLLSLASFYYLNVGDISAIYGVRGRIVSMAQQLRLHRCPSAVLSVHSNPVLQKFEQSERRLLFWAIYYVDVFASLQLGVPRLLKDFDIECALPISDVEYKDQLSMENEKADKKAKKIQLQGQVSSFSLQIIRFAKILGNILDSIFKRGMMDERITSEVALVHENALDNWRNQLPEMYYFQITVNGTVNLDEIRATNQRNTETKFDKKDIILFEKKILLLFYFLAKSMIHLPVIATKPLPKNVDNATKKKQSMFNNDSKGATNQDHMILDVDMTSPAIRTSSSYIILQQATNATLTIFQAINSMYLPLPLNVSRTLIRFSLLCARGSLEYTKGGALFLDNKNLLLDTIKDIENDRLLDLPGIASWHTLKLFDMSINLLLKAPNVKVERLDKFLEKKLNYYNRLMGLPPATTTSLKPLFGSQSKNSLENRQRTPNVKRENPEHEYLYGNDSNNNNNSEAGHSPMTNTTNGNKRLKYEKDAKRNAKDGGISKGENAHNFQNDTKKNMSTSNLFPFSFSNTDLTALFTHPEGPNCTNTNNGNVDVCNRASTDATDANIENLSFLNMAPFLQTGNSNIGQNTIENKPMHMDAIFSLPSNLDLMKDNMDSKPEQLEPVIKQNPENSKNNQFHQKGKSTNMEKNNLSFNNKSNYSLTKLMRLLNNDNSFSNISINNFLYQNDQNSASADPGTNKKAVTNAGANFKPPSTGSNTSQGSILGSTKHGMDNCDFNDLGNFNNFMTNVNYSGVDYDYIVDASLGLAPLLVDTPDISNTNTTSTTSNRSKNSIILDTTFNDDLDRSRMNAREVLNPTDSILSQGMVSSVSTRNTSNQRSLSSGNDSKGDSSSQENSKSATGNQLDTPSTLFQMRRTSSGPSASHRGPRRPQKNRYNTDRSKSSGGGSSNTDNVSDLFQWQNAK

SEQ ID NO: 61 - DNA, 2565 bp, Saccharomyces cerevisiae
atggcgatccaaacccgttttgcctcgggcacatctttatccgatttgaaaccaaaaccaagtgcaacttccatctccatacccatgcaaaatgtcatgaacaagcctgtcacggaacaggactcactgttccatatatgcgcaaacatccggaaaagactggaggtgttacctcaactcaaaccttttttacaattggcctaccaatcgagcgaggttttgagtgaaaggcaatctcttttgctatcccaaaagcagcatcaggaactgctcaagtccaatggcgctaaccgggacagtagcgacttggcaccaactttaaggtctagctctatctccacagctaccagtctcatgtcgatggaaggtatatcatacacgaattcgaatccctcggccaccccaaatatggaggacactttactgacttttagtatgggtattttgcccattaccatggattgcgaccctgtgacacaactatcacagctgtttcaacaaggtgcgcccctctgtatacttttcaactctgtgaagccgcaatttaaattaccggtaatagcatctgacgatttgaaagtctgtaaaaaatccatttatgactttatattgggctgcaagaaacactttgcatttaacgatgaggagcttttcactatatccgacgtttttgccaactctacttcccagctggtcaaagtgctagaagtagtagaaacgctaatgaattccagccctactattttcccctctaagagtaagacacagcaaatcatgaacgcagaaaaccaacaccgacatcagcctcagcagtcttcgaagaagcataacgagtatgttaaaattatcaaggaattcgttgcaacggaaagaaaatatgttcacgatttggaaattttggataaatatagacagcagttattagacagcaatctaataacgtctgaagagttgtacatgttgttccctaatttgggtgatgctatagattttcaaagaagatttctaatatccttggaaataaatgctttagtagaaccttccaagcaaagaatcggggctcttttcatgcattccaaacatttttttaagttgtatgagccttggtctattggccaaaatgcagccatcgaatttctctcttcaactttgcacaagatgagggttgatgaatcgcagcggttcataattaacaataaactggaattgcaatccttcctttataaacccgtgcaaaggctttgtagatatcccctgttggtcaaagaattgcttgctgaatcgagtgacgataataatacgaaagaacttgaagctgctttagatatttctaaaaatattgcgagaagtatcaacgaaaatcaaagaagaacagaaaatcatcaagtggtgaagaaactttatggtagagtggtcaactggaagggttatagaatttccaagttcggtgagttattatatttcgataaagtgttcatttcaacaacaaatagctcctcggaacctgaaagagaatttgaggtttatctttttgaaaaaatcatcatccttttttcagaggtagtgactaagaaatctgcatcatcactaatccttaagaagaaatcctcaacctcagcatcaatctccgcctcgaacataacggacaacaatggcagccctcaccacagttaccataagaggcatagcaatagtagtagcagtaataatatccatttatcttcgtcttcagcagcggcgataatacattccagtaccaatagtagtgacaacaattccaacaattcatcatcatcctcattattcaagctgtccgctaacgaacctaagctggatctaagaggtcgaattatgataatgaatctgaatcaaatcataccgcaaaacaaccggtcattaaatataacatgggaatccataaaagagcaaggtaatttccttttgaaattcaaaaatgaggaaacaagagataattggtcatcgtgtttacaacagttgattcatgatctgaaaaatgagcagtttaaggcaagacatcactcttcaacatcgacgacttcatcgacagccaaatcatcttcaatgatgtcacccaccacaactatgaatacaccgaatcatcacaacagccgccagacacacgatagtatggcttctttctcaagttctcatatgaaaagggtttcggatgtcctgcctaaacggaggaccacttcatcaagtttcgaaagtgaaattaaatccatttcagaaaatttcaagaactctattccagaatcttccatactcttcaggatatcatataataacaactctaataatacctctagtagcgagatcttcacacttttggtagaaaaagtttggaattttgacgacttgataatggcgatcaattctaaaatttcgaatacacataataacaacatttcaccaatcaccaagatcaaatatcaggacgaagatggggattttgttgtgttaggtagcgatgaagattggaatgttgctaaagaaatgttggcggaaaacaatgagaaattcttgaacattcgtctgtattga

SEQ ID NO: 62 - protein, 854 aa, Saccharomyces cerevisiae
MAIQTRFASGTSLSDLKPKPSATSISIPMQNVMNKPVTEQDSLFHICANIRKRLEVLPQLKPFLQLAYQSSEVLSERQSLLLSQKQHQELLKSNGANRDSSDLAPTLRSSSISTATSLMSMEGISYTNSNPSATPNMEDTLLTFSMGILPITMDCDPVTQLSQLFQQGAPLCILFNSVKPQFKLPVIASDDLKVCKKSIYDFILGCKKHFAFNDEELFTISDVFANSTSQLVKVLEVVETLMNSSPTIFPSKSKTQQIMNAENQHRHQPQQSSKKHNEYVKIIKEFVATERKYVHDLEILDKYRQQLLDSNLITSEELYMLFPNLGDAIDFQRRFLISLEINALVEPSKQRIGALFMHSKHFFKLYEPWSIGQNAAIEFLSSTLHKMRVDESQRFIINNKLELQSFLYKPVQRLCRYPLLVKELLAESSDDNNTKELEAALDISKNIARSINENQRRTENHQVVKKLYGRVVNWKGYRISKFGELLYFDKVFISTTNSSSEPEREFEVYLFEKIIILFSEVVTKKSASSLILKKKSSTSASISASNITDNNGSPHHSYHKRHSNSSSSNNIHLSSSSAAAIIHSSTNSSDNNSNNSSSSSLFKLSANEPKLDLRGRIMIMNLNQIIPQNNRSLNITWESIKEQGNFLLKFKNEETRDNWSSCLQQLIHDLKNEQFKARHHSSTSTTSSTAKSSSMMSPTTTMNTPNHHNSRQTHDSMASFSSSHMKRVSDVLPKRRTTSSSFESEIKSISENFKNSIPESSILFRISYNNNSNNTSSSEIFTLLVEKVWNFDDLIMAINSKISNTHNNNISPITKIKYQDEDGDFVVLGSDEDWNVAKEMLAENNEKFLNIRLY

SEQ ID NO: 63 - DNA, 4770 bp, Saccharomyces cerevisiae
atgtccgatactaacacgtctattcccaatacaagttctgcaagggaggcaggcaatgcttcacaaactccatcgatcagctcttcatctaacacttccactaccactaacacagaatcatcctcagcttctctttcttcttccccctcgacaagtgagttgaccagcattcgtccaattggaatagtagtcgctgcttatgactttaattatcccattaaaaaagacagttcttcgcaacttttgtctgtacaacaaggggaaaccatttatatacttaacaaaaactcatctgggtggtgggatggattagttattgacgacagtaatgggaaagttaacagaggctggtttcctcaaaacttcggtagacctttaagagacagtcatctcagaaagcacagtcatccgatgaaaaaatatagttccagtaagagctcaaggcgcagcagcttaaatagcttgggcaatagtgcatatttacatgtgcctagaaatccgagcaagagcaggagggggagttctactttatcagcgtctttatcaaatgcccacaatgcagaaacaagttccggccacaataacaccgtatcgatgaataattctcccttttcagcgccaaacgatgcttcccacataacccctcaatcttcgaactttaattccaatgctagtctatcccaggatatgacaaagagtgcagatggctcatctgagatgaatacaaacgcaattatgaataacaatgaaacaaatttacaaacttctggtgagaaagcaggtcccccactagtagcagaagaaacaattaagatattaccgttggaagagatagaaatgattattaatggtatacgttcgaacattgcttcgacttggtcccccataccactgataacgaaaacatccgattacaagttggtatactataacaaagaccttgatatatactgttcagaattacccttgatttctaactcaattatggaatccgatgacatttgtgacagcgaaccaaaattcccgcccaatgatcatcttgttaacctatatactagagatctgaggaaaaatgcgaatattgaggacagttctacgagatcgaagcaatcggaaagtgaacaaaatagatcaagccttctaatggaaaaacaggattcaaaagaaactgatggaaataataacagtattaatgatgatgataataataacgaaaataacaaaaacgaattcaatgaggctggtccttcatcattaaattctttatctgctccagatttaacgcagaatattcaatcaagggtagttgccccaagtcgctcttctatactggccaagagtgacatcttttatcactattcaagagatataaaattgtggacagaattacaagacctaacagtttattatactaaaacggctcacaagatgttccttaaagagaatcgtctcaatttcacgaaatactttgatttgatatcagattcaatagtcttcacacagttaggctgcaggctaatgcaacatgaaattaaagccaaaagttgcagcaaggagattaagaagattttcaaaggtctaatctcttcattgtcaaggataagtatcaattctcatttatatttcgattcagcttttcacagaaaaaaaatggatactatgaatgacaaggataacgataatcaggaaaataattgttctaggacggaaggggatgatggtaaaattgaagtagatagtgtacatgatctagtttcagttccattgtccggtaaacgtaatgtaagtaccagtacaacggatacattgactccaatgagatcatcattcagtacagtcaatgagaacgatatggaaaatttctcagtcttaggtccaagaaatagtgttaattctgtcgtaacaccaaggacttcaatacaaaattctactttggaagatttttcaccgtccaacaaaaattttaagtcagctaaatcgatttacgaaatggttgatgtggaattctcgaaatttttaaggcatgttcagttactttattttgtgttacagagctcagtcttctcagatgataatactttaccacagttgctcccaagattttttaaaggttcatttagcggtggttcttggacaaatccattttcgacttttattacggatgaatttggtaatgcgacaaagaacaaagctgtcacatctaatgaagtgaccgcttcgtcgtccaaaaattcctcaatatcaaggattccaccaaagatggcagatgctattgcctctgcgtcaggatatagcgctaattcagaaacaaattcccaaattgatttaaaagcaagcagtgccgcgtctggttcagtttttacacctttcaaccgtccttctcataacagaaccttttcaagagcaagagtttcaaaaaggaagaaaaaatatccattaactgtagacactttgaatacaatgaagaagaaatcctcgcaaatttttgaaaaattaaataatgctacaggtgaacacttaaaaattataagtaaacccaaaagcagaattaggaatttggaaataaattcaagcacatacgaacaaataaatcagaatgttttactattggagatactggagaatttagatctgtcaattttcatcaatttgaaaaacctgattaagacacccagtattttgttggatttggaaagcgaggaatttttagttcacgccatgtcttcggtctcctcagtactaacagagttttttgatataaagcaggcttttcatgacatcgtcatcagattaataatgacaacgcaacaaacgaccttagacgacccgtatttgttttcctcaatgaggtccaatttccctgtcggacatcatgaacctttcaagaatatctctaatacacctttggtcaagggccccttccataaaaaaaatgaacaattggcactctccttatttcacgtattggtgagtcaagatgtggagttcaataaccttgaatttttaaacaactccgacgattttaaagatgcttgtgaaaagtatgtcgagatttctaatcttgcgtgtattattgttgatcaattgattgaagaaagagaaaatttgctgaactacgcagcaagaatgatgaagaataatttgactgcagaactattgaaaggtgagcaagaaaaatggtttgatatttattccgaggactatagtgatgacgattcagaaaatgatgaagctatcatcgatgacgaattaggatctgaggactatattgaacgcaaagctgcgaacatagagaaaaaccttccatggtttttaacttcagattatgaaactagtcttgtctatgactcaagaggaaaaattcgtggcgggacaaaagaggcactgattgaacatttaaccagtcatgaacttgttgatgcggctttcaatgttacaatgttaataactttcagaagtatattaaccacaagagagtttttttatgccctgatttacaggtacaacttgtatcctcctgaagggctgagttacgatgattacaatatttggatagaaaaaaagtcaaacccgattaaatgccgtgtggtcaacattatgagaacatttttgacgcagtattggacaagaaattattatgaacctggcataccactgattctaaattttgccaagatggttgtatcggagaaaataccgggggcagaggatcttttgcaaaagataaatgaaaaactgataaatgagaatgagaaagaaccagtggatcctaagcaacaagattcggtatcggcagtcgtacagacaactaaacgtgacaataaatcaccgatacacatgtcttcgtcttctttaccatcttctgcttcttcagcgttttttagattgaagaaattgaagctcttggatattgacccatacacatatgccacacaattgactgtacttgaacatgacttatacctcaggatcactatgtttgaatgcttggatagggcatggggtaccaagtattgtaatatgggtggttctccgaacattacgaaatttatagctaatgctaatacgctaactaattttgtttctcataccattgtaaaacaggcagatgtcaagacacgttcaaaattaacgcaatattttgttaccgttgcccagcattgtaaagagttgaataatttttcttcaatgactgccatagtgtccgctttgtattcctccccaatctaccgactgaaaaagacatgggatttagtttccactgagtcgaaggaccttctgaagaacctaaacaaccttatggattccaagagaaattttgtgaagtatagagagctgttgcgatccgtgacggacgttgcatgtgttcccttttttggtgtatacctatctgatttaacatttacgtttgtcggaaacccagattttcttcacaattcaaccaacataataaacttcagcaagaggactaaaatcgcaaatatagtggaggaaattataagctttaaaagattccattacaagctgaaacgattggatgatattcagaccgttatagaagcgtctttggaaaatgtcccccacattgaaaagcagtatcaattatcactgcaagtggaaccgagatcaggaaacaccaaaggcagtacgcatgcttcttctgctagcggtacaaaaactgcaaaattcctaagtgaatttacagatgataaaaatggcaattttttgaagctaggtaagaaaaaacctccttctaggttatttcgataa

SEQ ID NO: 64 - protein, 1589 aa, Saccharomyces cerevisiae
MSDTNTSIPNTSSAREAGNASQTPSISSSSNTSTTTNTESSSASLSSSPSTSELTSIRPIGIVVAAYDFNYPIKKDSSSQLLSVQQGETIYILNKNSSGWWDGLVIDDSNGKVNRGWFPQNFGRPLRDSHLRKHSHPMKKYSSSKSSRRSSLNSLGNSAYLHVPRNPSKSRRGSSTLSASLSNAHNAETSSGHNNTVSMNNSPFSAPNDASHITPQSSNFNSNASLSQDMTKSADGSSEMNTNAIMNNNETNLQTSGEKAGPPLVAEETIKILPLEEIEMIINGIRSNIASTWSPIPLITKTSDYKLVYYNKDLDIYCSELPLISNSIMESDDICDSEPKFPPNDHLVNLYTRDLRKNANIEDSSTRSKQSESEQNRSSLLMEKQDSKETDGNNNSINDDDNNNENNKNEFNEAGPSSLNSLSAPDLTQNIQSRVVAPSRSSILAKSDIFYHYSRDIKLWTELQDLTVYYTKTAHKMFLKENRLNFTKYFDLISDSIVFTQLGCRLMQHEIKAKSCSKEIKKIFKGLISSLSRISINSHLYFDSAFHRKKMDTMNDKDNDNQENNCSRTEGDDGKIEVDSVHDLVSVPLSGKRNVSTSTTDTLTPMRSSFSTVNENDMENFSVLGPRNSVNSVVTPRTSIQNSTLEDFSPSNKNFKSAKSIYEMVDVEFSKFLRHVQLLYFVLQSSVFSDDNTLPQLLPRFFKGSFSGGSWTNPFSTFITDEFGNATKNKAVTSNEVTASSSKNSSISRIPPKMADAIASASGYSANSETNSQIDLKASSAASGSVFTPFNRPSHNRTFSRARVSKRKKKYPLTVDTLNTMKKKSSQIFEKLNNATGEHLKIISKPKSRIRNLEINSSTYEQINQNVLLLEILENLDLSIFINLKNLIKTPSILLDLESEEFLVHAMSSVSSVLTEFFDIKQAFHDIVIRLIMTTQQTTLDDPYLFSSMRSNFPVGHHEPFKNISNTPLVKGPFHKKNEQLALSLFHVLVSQDVEFNNLEFLNNSDDFKDACEKYVEISNLACIIVDQLIEERENLLNYAARMMKNNLTAELLKGEQEKWFDIYSEDYSDDDSENDEAIIDDELGSEDYIERKAANIEKNLPWFLTSDYETSLVYDSRGKIRGGTKEALIEHLTSHELVDAAFNVTMLITFRSILTTREFFYALIYRYNLYPPEGLSYDDYNIWIEKKSNPIKCRVVNIMRTFLTQYWTRNYYEPGIPLILNFAKMVVSEKIPGAEDLLQKINEKLINENEKEPVDPKQQDSVSAVVQTTKRDNKSPIHMSSSSLPSSASSAFFRLKKLKLLDIDPYTYATQLTVLEHDLYLRITMFECLDRAWGTKYCNMGGSPNITKFIANANTLTNFVSHTIVKQADVKTRSKLTQYFVTVAQHCKELNNFSSMTAIVSALYSSPIYRLKKTWDLVSTESKDLLKNLNNLMDSKRNFVKYRELLRSVTDVACVPFFGVYLSDLTFTFVGNPDFLHNSTNIINFSKRTKIANIVEEIISFKRFHYKLKRLDDIQTVIEASLENVPHIEKQYQLSLQVEPRSGNTKGSTHASSASGTKTAKFLSEFTDDKNGNFLKLGKKKPPSRLFR

SEQ ID NO: 65 - DNA, 897 bp, Saccharomyces cerevisiae
atgagcggtgaattagcaaattacaaaagacttgagaaagtcggtgaaggtacatacggtgttgtttataaagcgttagacttaagacctggccaaggtcaaagagtagtcgcattgaagaaaataagactagagagtgaagacgagggtgttcccagtacagccatcagagaaatctcattattgaaggaattaaaagacgataatattgtcagattatacgatattgttcactctgatgcacacaagctatatcttgtttttgagttcctcgatttggacctgaaaagatatatggagggtattccaaaggaccaaccgttaggagctgatattgttaagaagtttatgatgcaactttgtaagggtattgcatactgccactcacaccgtattctgcatcgtgatttaaaaccgcagaacttattgattaacaaagatgggaatctaaaactaggtgattttggcttagcgcgtgcttttggtgttccgttgagagcttacacacatgaaattgttactctatggtatagagctccggaggtattactgggtggaaaacaatatagtacaggtgtcgatacatggtccatcggctgtatatttgccgaaatgtgtaacaggaaaccaatcttcagtggcgatagtgagatcgatcagattttcaagatattcagagtattgggaacgccgaatgaagctatatggccagatattgtctacttgcctgatttcaagccaagctttcctcaatggcgcagaaaagacctatcacaagtggtaccaagtctagatccacgcggtattgatttgttggacaaactcctcgcgtatgaccctattaaccggattagcgccagaagagcagccatccacccctacttccaagaatcataa

SEQ ID NO: 66 - protein, 298 aa, Saccharomyces cerevisiae
MSGELANYKRLEKVGEGTYGVVYKALDLRPGQGQRVVALKKIRLESEDEGVPSTAIREISLLKELKDDNIVRLYDIVHSDAHKLYLVFEFLDLDLKRYMEGIPKDQPLGADIVKKFMMQLCKGIAYCHSHRILHRDLKPQNLLINKDGNLKLGDFGLARAFGVPLRAYTHEIVTLWYRAPEVLLGGKQYSTGVDTWSIGCIFAEMCNRKPIFSGDSEIDQIFKIFRVLGTPNEAIWPDIVYLPDFKPSFPQWRRKDLSQVVPSLDPRGIDLLDKLLAYDPINRISARRAAIHPYFQES

SEQ ID NO: 67 - DNA, 576 bp, Saccharomyces cerevisiae
atgcaaacgctaaagtgtgttgttgtcggtgatggtgctgttgggaaaacgtgccttctaatctcctatacaacgaatcaatttccagccgactatgttccaacagtgttcgataactatgcggtgactgtgatgattggtgatgaaccatatacgttaggtttgtttgatacggccggtcaagaagattacgatcgattgagacccttgtcatatccttctactgatgtatttttggtttgtttcagtgttatttccccaccctcttttgaaaacgttaaagaaaaatggttccctgaagtacatcaccattgtccaggtgtaccatgcctggtcgtcggtacgcagattgatctaagggatgacaaggtaatcatcgagaagttgcaaagacaaagattacgtccgattacatcagaacaaggttccaggttagcaagagaactgaaagcagtaaaatatgtcgagtgttcggcactaacacaacgcggtttgaagaatgtattcgatgaagctatcgtggccgccttggagcctcctgttatcaagaaaagtaaaaaatgtgcaattttgtag

SEQ ID NO: 68 - protein, 191 aa, Saccharomyces cerevisiae
MQTLKCVVVGDGAVGKTCLLISYTTNQFPADYVPTVFDNYAVTVMIGDEPYTLGLFDTAGQEDYDRLRPLSYPSTDVFLVCFSVISPPSFENVKEKWFPEVHHHCPGVPCLVVGTQIDLRDDKVIIEKLQRQRLRPITSEQGSRLARELKAVKYVECSALTQRGLKNVFDEAIVAALEPPVIKKSKKCAIL

SEQ ID NO: 69 - DNA, 1581 bp, Saccharomyces cerevisiae
atggcacaaaacaattttgattttaaattcagccaatgttttggtgataaagcagatattgtggtgacagaggcggatctaattacagctgtagaatttgactatactggaaattatctggccactggtgataaaggtggccgtgtggtactttttgaaagaagtaatagtagacattgcgaatataagtttttaacagagtttcaaagtcatgacgcagaatttgattatttaaaatccttagaaattgaagagaagataaatgaaatcaaatggttacgaccaactcaaagatcacactttcttttgagcacaaatgataaaactataaaactttggaaagtttatgagaaaaatataaaattggtaagccagaacaacttaacagaaggggttacgtttgcgaaaaaaggcaagcccgataaccataacagtagaggaggctccgtgagggctgtattatctttacaatcgctgaaactgcctcaattatcacagcatgacaaaatcattgctgccaccccaaagcgtatatatagtaatgcacatacctatcacattaattcgatatcgttgaattctgatcaggaaacatttttaagtgctgacgacttgagaatcaatttatggaatctggacataccagatcagagcttcaacatcgtagatatcaagccaaccaatatggaagaacttaccgaagtgatcacaagcgctgaatttcatccgcaagaatgtaatttattcatgtactcttcttccaaaggtacaataaagttgtgtgatatgagacaaaattccctatgtgacaataaaaccaaaacatttgaagaatatttggatccaatcaatcataatttttttacagaaatcacgtcgtcaatttccgacataaaatttagtccaaatggtaggtatattgcatccagagattatttaactgtcaaaatttgggacgtaaatatggataataagcctttgaaaaccataaacatacatgagcaattgaaggaaagattgagtgatacctatgaaaacgatgcgattttcgataaatttgaagttaattttagtggtgatagttcaagtgtaatgactggttcttacaataacaatttcatgatctatcctaatgtagtaacttctggtgataatgataatggcatagtcaaaacttttgatgaacacaacgcacctaatagcaacagcaataaaaatatccacaacagcatacaaaataaagattctagtagtagtggcaacagccacaagcgtaggagtaacggacgcaacacaggcatggtgggaagtagtaatagctctagaagcagtatagcgggaggagaaggagcaaattcggaggactcgggaaccgaaatgaatgaaatcgtgttacaagctgacaaaacagcgttcaggaacaaaagatacggttcgctagcgcaaaggtctgcaagaaataaggattggggtgacgatattgatttcaagaagaatattttacatttctcatggcatccaagagaaaatagtattgctgttgcagcaactaataatttattcattttttccgcattataa

SEQ ID NO: 70 - protein, 526 aa, Saccharomyces cerevisiae
MAQNNFDFKFSQCFGDKADIVVTEADLITAVEFDYTGNYLATGDKGGRVVLFERSNSRHCEYKFLTEFQSHDAEFDYLKSLEIEEKINEIKWLRPTQRSHFLLSTNDKTIKLWKVYEKNIKLVSQNNLTEGVTFAKKGKPDNHNSRGGSVRAVLSLQSLKLPQLSQHDKIIAATPKRIYSNAHTYHINSISLNSDQETFLSADDLRINLWNLDIPDQSFNIVDIKPTNMEELTEVITSAEFHPQECNLFMYSSSKGTIKLCDMRQNSLCDNKTKTFEEYLDPINHNFFTEITSSISDIKFSPNGRYIASRDYLTVKIWDVNMDNKPLKTINIHEQLKERLSDTYENDAIFDKFEVNFSGDSSSVMTGSYNNNFMIYPNVVTSGDNDNGIVKTFDEHNAPNSNSNKNIHNSIQNKDSSSSGNSHKRRSNGRNTGMVGSSNSSRSSIAGGEGANSEDSGTEMNEIVLQADKTAFRNKRYGSLAQRSARNKDWGDDIDFKKNILHFSWHPRENSIAVAATNNLFIFSAL

SEQ ID NO: 71 - DNA, 3396 bp, Saccharomyces cerevisiae
atgagtgatcaaaataatcgatcgagaaatgaatatcactcaaaccggaagaatgaaccttcctatgaactccaaaatgcacatagcgggctatttcactcttctaatgaagaattaacaaacaggaaccaaagatataccaatcaaaatgccagcatgggttcattcactccagtccaatctttgcaatttccagaacaatctcagcaaacaaatatgctttataacggtgacgatggcaataataatactatcaatgataacgaacgagacatatatggaggttttgtcaaccaccatcgccagcgtcccccaccagcaactgcagaatacaatgacgtttttaatacgaatagtcaacagctaccgtcggaacatcaatacaataacgtaccttcatatccacttccttcgataaatgtgattcaaaccactccagaactcatacataacggctcacagactatggccacccccatcgaaaggcccttctttaacgaaaacgactactattataataacaggaactctaggacgtcaccgagtattgcttctagtagcgatggttatgcagatcaggaagctaggcccattttggagcaacccaacaataacatgaatagcggtaatattcctcaataccatgaccaaccttttggatacaacaatggttaccatggcctacaggcaaaagattactatgacgatccggagggtggttatattgatcagagaggagatgactatcagattaattcatatttgggtagaaacggtgaaatggttgatccttacgattatgaaaacagtttaagacatatgactcctatggagcgtagagaatatcttcatgatgatagcagacccgtaaacgatggaaaagaagaattagacagtgtgaaaagcggttactctcatagagacttgggggaatatgacaaggatgatttttcaagggatgacgagtacgatgatctcaacactattgataaattacagtttcaagctaatggtgtacctgcatcatcctcggtgtcttctatcggatctaaagaatccgacataatagtaagcaatgataacttaaccgcaaatagagcactaaagagaagcggtactgaaattaggaaattcaaactttggaatggtaattttgttttcgattctccaatcagtaagacgctattggaccaatacgctactacaacagaaaatgcaaacactttaccaaatgagtttaagtttatgagatatcaagcagttacttgcgaacctaatcaacttgcagagaagaatttcacggtgaggcagttgaagtatttaactccaagggaaacggaattgatgctagtagtcacaatgtataatgaagaccatatcctgttaggaagaactttgaaaggtattatggacaatgtcaaatatatggtgaaaaaaaaaaattcaagcacttgggggccggatgcatggaaaaagattgtcgtttgtatcatttcagatggtagatccaaaattaatgaacgctcgctagcattactaagttcgttaggttgttaccaggacgggtttgctaaggatgaaattaatgaaaaaaaagtggcaatgcatgtctacgaacatacgacaatgatcaacatcacaaatatttcggaatcagaggtttcattagaatgcaatcaaggtaccgttccaatacaacttttgttttgtttgaaagagcaaaatcagaaaaaaattaactcacatagatgggcatttgaaggctttgcagaattactgcgtcccaatatcgttacattgttagatgctggtaccatgccaggtaaagattctatttaccagttatggagagagttcaggaatccaaatgttggtggcgcatgtggtgaaataagaactgatttgggtaagagatttgtaaagcttttgaatcctttagttgcatcacagaatttcgaatacaaaatgtccaatattttagacaaaacaaccgagtctaactttggatttattactgttctaccgggggcattctctgcgtataggtttgaagctgtgagaggccaaccattacagaagtacttttatggtgaaattatggaaaatgaaggttttcattttttttcttccaatatgtatcttgctgaagatcgtattttatgctttgaagtggtcacaaaaaaaaattgtaattggattttgaaatactgcagaagttcttatgcttcaacagatgtaccggagagggtccctgaatttattcttcagaggaggcgttggttgaatggttcattttttgctagtgtatattccttttgtcatttttacagagtctggagcagtggtcataatattggtagaaaactccttttgacggttgaatttttttaccttttcttcaatacattgatttcatggttttcattgagttcatttttcctattctttagaattctcactgtttctattgcactggcataccattcagcatttaatgtgttgtccgtcatattcctgtggctttatgggatttgtaccttatcaacattcatactgtcattgggtaataaacctaaaagtactgagaaattttatgttctaacttgcgtcatttttgcggtgatgatgatttacatgatattctgcagtatattcatgagtgtcaaatccttccaaaatatattgaaaaacgataccatcagctttgagggtttgattaccacagaagctttcagggatattgttatctctctgggctccacttattgtttgtacctaatcagttcaattatctatttgcagccatggcatatgttgacaagttttattcagtatattttattgagtccttcttacatcaatgttttgaatatctatgcattttgtaatgtccacgacttatcatggggtacaaagggtgcaatggcaaatccgctgggtaagattaatactacagaagatggtacgttcaaaatggaagttctggtctctagttcagagattcaagcaaactacgataaatatttgaaagttttaaatgacttcgatccaaaatcagaatctcggcctactgagccatcttatgatgaaaaaaagactggctattatgcaaacgttagatctctcgtgattatcttttgggtcatcacaaatttcatcatcgttgctgttgtcttagaaaccggtgggattgcagattatattgctatgaaatccatatcaactgatgacactttagaaactgcaaagaaggcggaaattcccttaatgaccagtaaggcctcaatttattttaatgtaattttatggttagttgcattatcggcattaataaggttcattggttgctcaatatacatgatagtaaggttttttaaaaaggttacatttcgctaa

SEQ ID NO: 72 - protein, 1131 aa, Saccharomyces cerevisiae
MSDQNNRSRNEYHSNRKNEPSYELQNAHSGLFHSSNEELTNRNQRYTNQNASMGSFTPVQSLQFPEQSQQTNMLYNGDDGNNNTINDNERDIYGGFVNHHRQRPPPATAEYNDVFNTNSQQLPSEHQYNNVPSYPLPSINVIQTTPELIHNGSQTMATPIERPFFNENDYYYNNRNSRTSPSIASSSDGYADQEARPILEQPNNNMNSGNIPQYHDQPFGYNNGYHGLQAKDYYDDPEGGYIDQRGDDYQINSYLGRNGEMVDPYDYENSLRHMTPMERREYLHDDSRPVNDGKEELDSVKSGYSHRDLGEYDKDDFSRDDEYDDLNTIDKLQFQANGVPASSSVSSIGSKESDIIVSNDNLTANRALKRSGTEIRKFKLWNGNFVFDSPISKTLLDQYATTTENANTLPNEFKFMRYQAVTCEPNQLAEKNFTVRQLKYLTPRETELMLVVTMYNEDHILLGRTLKGIMDNVKYMVKKKNSSTWGPDAWKKIVVCIISDGRSKINERSLALLSSLGCYQDGFAKDEINEKKVAMHVYEHTTMINITNISESEVSLECNQGTVPIQLLFCLKEQNQKKINSHRWAFEGFAELLRPNIVTLLDAGTMPGKDSIYQLWREFRNPNVGGACGEIRTDLGKRFVKLLNPLVASQNFEYKMSNILDKTTESNFGFITVLPGAFSAYRFEAVRGQPLQKYFYGEIMENEGFHFFSSNMYLAEDRILCFEVVTKKNCNWILKYCRSSYASTDVPERVPEFILQRRRWLNGSFFASVYSFCHFYRVWSSGHNIGRKLLLTVEFFYLFFNTLISWFSLSSFFLFFRILTVSIALAYHSAFNVLSVIFLWLYGICTLSTFILSLGNKPKSTEKFYVLTCVIFAVMMIYMIFCSIFMSVKSFQNILKNDTISFEGLITTEAFRDIVISLGSTYCLYLISSIIYLQPWHMLTSFIQYILLSPSYINVLNIYAFCNVHDLSWGTKGAMANPLGKINTTEDGTFKMEVLVSSSEIQANYDKYLKVLNDFDPKSESRPTEPSYDEKKTGYYANVRSLVIIFWVITNFIIVAVVLETGGIADYIAMKSISTDDTLETAKKAEIPLMTSKASIYFNVILWLVALSALIRFIGCSIYMIVRFFKKVTFR

SEQ ID NO: 73 - DNA, 2892 bp, Saccharomyces cerevisiae
atgacgagaaacccgtttatggtggaaccttcgaatggctctcctaatagacgtggtgcttcaaacctctccaaattttacgcaaacgctaacagcaactctcggtgggctaatcccagtgaggagagtttggaggatagctatgaccaatctaacgttttccaaggccttccggcatctccttcgagagctgcactaagatactccccagaccgtcgccatagaactcaattttaccgcgatagtgcccataactctccagttgctccgaacaggtatgctgctaatctacaagagtctcccaaaagagcaggcgaggctgtcatacatctaagtgaggggagtaacctttacccccgcgataatgcagatctaccggtagacccctaccatctatcaccccagcaacagcccagtaacaatctgtttggaagtggcagattgtattctcaaagctcgaaatacacgatgtctactacttccacaacggctccctctctggcagaagcagacgatgaaaaggaaaaatacctcacttcgactacttcctatgatgatcagtctacaattttctctgcagacactttcaatgaaacaaaatttgaactgaaccatccaacaagacagcagtatgtaagacgtgccaattctgagagtaagagaagaatggtctcagacttgcctcccccaagcaagaagaaggcactattgaaactagacaacccgataccaaaaggtctgttggatactttgcctcgtaggaactcccctgagtttacggaaatgagatatacagcctgcactgtggaacctgacgattttttgagagaaggttacactttgagattcgcagagatgaacagagaatgtcaaattgccatttgtattaccatgtacaatgaagataaatattcattggcaagaaccatccactccattatgaagaatgttgctcatctttgtaagcgtgaaaaatctcatgtttggggccccaatggctggaagaaagtctctgtaattctgattagtgacggtagagcaaaagtcaaccaagggtctctcgactatttagctgctttgggtgtttatcaagaagatatggccaaggcgtctgtgaatggtgatccggtaaaagcgcacatttttgaattgacaactcaggtctctatcaacgccgatctggattatgtttcaaaggacattgttcctgtgcaattggttttttgtctaaaagaagaaaataagaaaaagatcaattcccatcgttggctattcaacgcgttttgtcccgttttgcaacctactgtagttactttggttgatgtcggtacacgtttaaacaatacagcaatttacaggttatggaaggtttttgatatggattcaaatgtggctggtgcggctggtcagattaagactatgaaggggaagtggggactgaaacttttcaatccattagttgcatcgcaaaattttgaatataagatctcgaatattttagataaaccattagaaagtgtttttggttatatctctgttcttcctggtgccctgtccgcatataggtatagagccttaaaaaatcatgaagatggcactggccctctcagatcgtatttccttggtgaaactcaagaaggcagagaccatgatgttttcactgcaaatatgtacttggctgaagatagaattctttgttgggaattggtcgccaagcgagatgcaaaatgggttctaaaatatgttaaggaagccactggtgaaacggatgttcccgaagacgtttctgaatttatttctcaaagaagacgttggttaaatggtgcaatgtttgccgcaatttatgctcaattgcatttctaccaaatttggaaaactaaacattctgttgtacgcaagttctttcttcatgttgaattcctttatcaatttattcagatgcttttttcctggttttctattgcaaatttcgttcttaccttttattatttagcaggatcaatgaatttagttattaaacatggtgaggccttattcattttttttaaatacctgatcttttgtgacttggcaagtttattcattatttccatgggtaatagaccccagggcgcgaaacatttattcattacctccatggttatactgtctatatgtgccacatattctctaatttgtgggtttgtttttgctttcaagtcgttagcttctggaacggaatcccacaaaatatttgtcgacatcgttatctcattgctctccacctatggcctatactttttctcatcactgatgtacctagatccttggcacatgtttacatcatccatacaatactttttgacacttcccgcctttacgtgtactttacagatttttgccttctgtaatacacacgacgtttcctggggtactaaaggttccacacaggagtccaagcaattgtccaaggccattgtcgttcaaggtccagatgggaaacagattgtggaaacagattggcctcaggaagttgataagaagtttttggaaataaaaagtcgtttgaaagaaccagaatttgaagaatcaagcggcaatgaaaaacaatccaagaatgattattatagagatataagaaccagaattgtgatgatttggatgctatcaaatctaatactgatcatgtctataattcaagtctttacaccacaagatactgacaatggttatttgatattcattttatggtctgtggccgctttagctgcctttagggtggttggttccatggcctttttgttcatgaaatacttgcgtataatagtgagttacagaaataaagttgaaggtagcggctcatgggaagtctctaaattagacttaccaaatgttttccacaaaaagggctaa

SEQ ID NO: 74 - protein, 963 aa, Saccharomyces cerevisiae
MTRNPFMVEPSNGSPNRRGASNLSKFYANANSNSRWANPSEESLEDSYDQSNVFQGLPASPSRAALRYSPDRRHRTQFYRDSAHNSPVAPNRYAANLQESPKRAGEAVIHLSEGSNLYPRDNADLPVDPYHLSPQQQPSNNLFGSGRLYSQSSKYTMSTTSTTAPSLAEADDEKEKYLTSTTSYDDQSTIFSADTFNETKFELNHPTRQQYVRRANSESKRRMVSDLPPPSKKKALLKLDNPIPKGLLDTLPRRNSPEFTEMRYTACTVEPDDFLREGYTLRFAEMNRECQIAICITMYNEDKYSLARTIHSIMKNVAHLCKREKSHVWGPNGWKKVSVILISDGRAKVNQGSLDYLAALGVYQEDMAKASVNGDPVKAHIFELTTQVSINADLDYVSKDIVPVQLVFCLKEENKKKINSHRWLFNAFCPVLQPTVVTLVDVGTRLNNTAIYRLWKVFDMDSNVAGAAGQIKTMKGKWGLKLFNPLVASQNFEYKISNILDKPLESVFGYISVLPGALSAYRYRALKNHEDGTGPLRSYFLGETQEGRDHDVFTANMYLAEDRILCWELVAKRDAKWVLKYVKEATGETDVPEDVSEFISQRRRWLNGAMFAAIYAQLHFYQIWKTKHSVVRKFFLHVEFLYQFIQMLFSWFSIANFVLTFYYLAGSMNLVIKHGEALFIFFKYLIFCDLASLFIISMGNRPQGAKHLFITSMVILSICATYSLICGFVFAFKSLASGTESHKIFVDIVISLLSTYGLYFFSSLMYLDPWHMFTSSIQYFLTLPAFTCTLQIFAFCNTHDVSWGTKGSTQESKQLSKAIVVQGPDGKQIVETDWPQEVDKKFLEIKSRLKEPEFEESSGNEKQSKNDYYRDIRTRIVMIWMLSNLILIMSIIQVFTPQDTDNGYLIFILWSVAALAAFRVVGSMAFLFMKYLRIIVSYRNKVEGSGSWEVSKLDLPNVFHKKG

SEQ ID NO: 75 - DNA, 3498 bp, Saccharomyces cerevisiae
atgaccggcttgaatggagatgatcctgatgactactatctgaaccttaatcaagatgaagagtctctacttaggtcaagacacagtgtcggctcaggagcacctcatagacaaggctctttagtgcggcccgaaagaagccgactgaacaatcctgataatccacatttttattatgcgcagaaaacgcaggagcagatgaatcacctggatgttttaccatcaagtaccggtgtaaacccaaatgcaactcgtcggagtggctccctgcgctccaaaggctcagtgagaagcaaatttagtggccgcgaaacggatagctatcttttacaagatatgaatactactgacaagaaggcttccgttaaaataagtgatgaaggtgttgcggaagacgaatttgataaagatggtgatgtggacaatttcgaagaaagctccacgcagcccataaataagtctatcaaaccattaagaaaggaaacgaatgatacattgtcattttggcagatgtactgttatttcattacgttttgggcacctgctccaattcttgctttctgcgggatgccaaagaaggaaagacaaatggcgtggagagaaaaggttgctttaatttctgtcatcttgtacattggtgcgattgtggctttcctgacttttggtttcactaaaaccgtttgtagtagttcgaaactacgtttgaaaaacaacgaagtatcaacagaatttgtcgtaattaacggtaaggcttatgaattggatacttcctcgcgttccggtatacaagacgttgaagtagattcagacaccctttatgggccctggtcagatgctggtaaagatgcttcgttcttgtttcaaaatgtgaatggtaactgtcataaccttataactccaaagagtaattcttccattccccatgacgatgataataatttagcatggtattttccttgtaagttaaagaatcaagatggctcttcgaagccaaacttcacagttgaaaattacgcaggatggaactgtcatacgtctaaagaagatagggacgcattttacggtttaaagtcgaaagctgatgtttacttcacttgggatggtataaagaactcttctagaaacttgattgtttataatggcgacgttttggatttagatcttcttgattggttggaaaaggatgacgttgactatcccgttgtattcgatgacttgaagacttcaaatttacaaggttatgatctttcgttggttttgtcaaatgggcatgaaagaaaaattgcgagatgtttgagcgaaattattaaagttggtgaagtagactccaaaaccgtcggttgtattgcctctgatgtcgttttgtatgtttctctggtatttattctttcagtggtgataattaaattcataattgcctgctacttccgttggactgtagctaggaaacaaggtgcatatatcgtggacaataaaacaatggataaacacacaaacgatatcgaggattggtctaataatattcaaacaaaagctcctctaaaggaagtagatcctcatttgaggccaaagaaatactcaaaaaagtcgttgggacacaagcgtgcttcaacctttgacttgctgaaaaaacacagctccaaaatgtttcaatttaacgaatctgtgatagatctagacacctccatgagcagttcactacaatcttctggttcatacagaggaatgacaacaatgaccactcaaaatgcttggaaactctcgaatgaaaacaaagctgtacattcccgtaatccatctactttgttgcctacatcctcgatgttttggaataaagcgacttcctctcctgtaccaggatcatcgctgattcagagtcttgattcgacgattatacatcccgatatcgttcaacaaccaccactggattttatgccatacgggttcccattgattcatactatctgttttgttacttgttattctgaggatgaagagggtttaagaaccactttagactctctttctaccacagattatccaaattcccataaactactgatggttgtttgtgatggtttaattaagggctcgggcaacgataagactactccagagatagcgttaggaatgatggacgactttgtcaccccacctgatgaagttaaaccttactcctatgtggcagtggcatcaggctctaaaagacacaatatggccaagatatatgcgggtttttacaaatatgacgattctacaattccaccagaaaatcaacaacgtgtcccaatcattacaattgtgaagtgcggtactcctgcagagcagggggccgccaaacccggtaacagaggtaagcgtgattctcaaattattctgatgtcctttttagaaaaaataacatttgatgaaagaatgactcaattggaatttcagcttttaaaaaatatttggcagattacggggctaatggcagacttctacgaaacggtacttatggttgatgctgatactaaagtctttcccgatgctttaactcatatggtcgctgaaatggttaaagatcctttgattatgggtctttgtggtgagaccaagatcgctaataaggcacaatcttgggtaactgcaattcaagtgtttgagtactatatttcgcatcatcaggctaaagcttttgaatctgtcttcggttcggtaacttgtttgccgggatgtttctcaatgtatcgtataaaatctcctaaaggttcagatggttattgggtacctgtattggcaaatccagatattgttgaaagatattcggataatgttacaaacactttgcataagaagaacttattattacttggtgaagatagatttttatcttcattaatgttaaagactttccctaagagaaagcaagtatttgttccaaaagctgcttgtaaaactattgcccctgataaattcaaagtcttactttcccagcgtcgaagatggattaattctacggtacataacctttttgaattagttctaatcagagacttatgtggcactttctgtttttccatgcaatttgtgattggtattgaattgattggtactatggtactgccgttagccatttgctttactatttatgtcattatttttgccattgtatcaaaacctacacccgtaatcactttagttttactggcaattattcttggtctgcccggcttaattgttgttataactgctacgagatggtcgtacctatggtggatgtgcgtatatatttgtgctttgcctatttggaatttcgtactaccttcatatgcgtactggaaatttgatgacttctcatggggtgatacgagaactattgcgggaggtaataaaaaggcacaagacgagaatgaaggtgaatttgatcactcaaagattaaaatgaggacatggagggaatttgaaagggaagatattctcaatcggaaggaggaaagtgactccttcgttgcatag

SEQ ID NO: 76 - protein, 1165 aa, Saccharomyces cerevisiae
MTGLNGDDPDDYYLNLNQDEESLLRSRHSVGSGAPHRQGSLVRPERSRLNNPDNPHFYYAQKTQEQMNHLDVLPSSTGVNPNATRRSGSLRSKGSVRSKFSGRETDSYLLQDMNTTDKKASVKISDEGVAEDEFDKDGDVDNFEESSTQPINKSIKPLRKETNDTLSFWQMYCYFITFWAPAPILAFCGMPKKERQMAWREKVALISVILYIGAIVAFLTFGFTKTVCSSSKLRLKNNEVSTEFVVINGKAYELDTSSRSGIQDVEVDSDTLYGPWSDAGKDASFLFQNVNGNCHNLITPKSNSSIPHDDDNNLAWYFPCKLKNQDGSSKPNFTVENYAGWNCHTSKEDRDAFYGLKSKADVYFTWDGIKNSSRNLIVYNGDVLDLDLLDWLEKDDVDYPVVFDDLKTSNLQGYDLSLVLSNGHERKIARCLSEIIKVGEVDSKTVGCIASDVVLYVSLVFILSVVIIKFIIACYFRWTVARKQGAYIVDNKTMDKHTNDIEDWSNNIQTKAPLKEVDPHLRPKKYSKKSLGHKRASTFDLLKKHSSKMFQFNESVIDLDTSMSSSLQSSGSYRGMTTMTTQNAWKLSNENKAVHSRNPSTLLPTSSMFWNKATSSPVPGSSLIQSLDSTIIHPDIVQQPPLDFMPYGFPLIHTICFVTCYSEDEEGLRTTLDSLSTTDYPNSHKLLMVVCDGLIKGSGNDKTTPEIALGMMDDFVTPPDEVKPYSYVAVASGSKRHNMAKIYAGFYKYDDSTIPPENQQRVPIITIVKCGTPAEQGAAKPGNRGKRDSQIILMSFLEKITFDERMTQLEFQLLKNIWQITGLMADFYETVLMVDADTKVFPDALTHMVAEMVKDPLIMGLCGETKIANKAQSWVTAIQVFEYYISHHQAKAFESVFGSVTCLPGCFSMYRIKSPKGSDGYWVPVLANPDIVERYSDNVTNTLHKKNLLLLGEDRFLSSLMLKTFPKRKQVFVPKAACKTIAPDKFKVLLSQRRRWINSTVHNLFELVLIRDLCGTFCFSMQFVIGIELIGTMVLPLAICFTIYVIIFAIVSKPTPVITLVLLAIILGLPGLIVVITATRWSYLWWMCVYICALPIWNFVLPSYAYWKFDDFSWGDTRTIAGGNKKAQDENEGEFDHSKIKMRTWREFEREDILNRKEESDSFVA

SEQ ID NO: 77 - DNA, 1476 bp, Saccharomyces cerevisiae
atgtccaacccaatagaaaacacagaaaactcacagaatactagttcatcaaggtttttgaggaatgtacaaaggttggccttaaacaatgtaacaaatacgacatttcaaaagagtaatgcgaataatccagccctaacaaatttcaaatctacactaaactcagtaaagaaggagggaagtcggattcctcaatttactagagaaagcgtatcaagatcaacagccgcacaagaggagaaaagaaccctgaaagaaaatggtatccaactccccaaaaacaatcttttagatgataaagaaaaccaagacccaagtagtcagcaatttggtgcgctaacttctataaaggaggggagagctgagctgcctgcaaatataagtttacaagaatcctcctcagcgaaggagataatccagcatgatcccctaaaaggcgttggatcaagcactgaggtagtccataactcggtagaaaacgaaaaacttcatccagctagaagtcaacttcaagttagaaataccgaaagtgaaactgatagtggaaaaaaaagaccaatttctacaattgttgaacaagaactgcccaaaaagtttaaagtgtgcgatgaaaatggcaaagaagaatatgaatgggaagacctagatgcagaagatgtaaatgatccattcatggtcagcgagtacgtcaatgatatattcgaatatctccaccaactagaggtcattactcttccaaagaaggaagatctctatcagcatagaaatattcatcaaaatcgagatatcctagttaattggttggttaaaatccataataaattcggcttattaccggagactttgtatcttgccattaacataatggacaggtttttaggtaaagagctagttcaactggataagttacaattggttggcacatcatgccttttcattgcctctaaatatgaagaggtctattctcctagtataaaacatttcgcatcagagacagacggtgcatgtacggaagatgaaatcaaagaaggggagaaattcattttaaagacattgaaatttaacctaaattatcccaatccgatgaattttctgagaagaatttcgaaagcagatgactacgatatacagtctcgaactcttgccaaattcttattagagatatcattggtagatttcagatttattgggatactaccctcattgtgtgcagcagctgcgatgtttatgtcgagaaaaatgttaggtaaaggtaaatgggatggaaatctaatacactatagcggcgggtatactaaagaagaacttgcgcccgtgtgtcacatgataatggattatctagtgagtccaattgttcatgatgaatttcatagaaaatatcaatctagaagatttatgaaagcttctataatttccgtccaatgggctttaaaggttagaaaaaacggctatgatataatgaccttgcatgaatga

SEQ ID NO: 78 - protein, 491 aa, Saccharomyces cerevisiae
MSNPIENTENSQNTSSSRFLRNVQRLALNNVTNTTFQKSNANNPALTNFKSTLNSVKKEGSRIPQFTRESVSRSTAAQEEKRTLKENGIQLPKNNLLDDKENQDPSSQQFGALTSIKEGRAELPANISLQESSSAKEIIQHDPLKGVGSSTEVVHNSVENEKLHPARSQLQVRNTESETDSGKKRPISTIVEQELPKKFKVCDENGKEEYEWEDLDAEDVNDPFMVSEYVNDIFEYLHQLEVITLPKKEDLYQHRNIHQNRDILVNWLVKIHNKFGLLPETLYLAINIMDRFLGKELVQLDKLQLVGTSCLFIASKYEEVYSPSIKHFASETDGACTEDEIKEGEKFILKTLKFNLNYPNPMNFLRRISKADDYDIQSRTLAKFLLEISLVDFRFIGILPSLCAAAAMFMSRKMLGKGKWDGNLIHYSGGYTKEELAPVCHMIMDYLVSPIVHDEFHRKYQSRRFMKASIISVQWALKVRKNGYDIMTLHE

SEQ ID NO: 79 - DNA, 1251 bp, Aspergillus nidulans
atgccgcaaccaggatcgtcagtggatttctcaaatctgctgaaccctcaaaacaacacggccatccctgccgaagtctccaacgctacagctagtgctaccatggcttcaggagccagtctgttgccacctatggtgaagggcgctcgcccggctgcagaggaagctcgtcaggaccttcctcgaccatacaagtgccccctgtgcgagcgcgccttccaccgcctagaacaccaaacaagacacattcgcactcacactggtgaaaagccccatgcctgccagttccccggctgctcgaagcgtttcagtcgctcagatgagcttacccggcactcgcgaatccataacaaccccaactcaagacgtggaaacaaggctcaacacctggcggcagccgccgcagctgcagctgcgaaccaagatggtagcgcgatggcgaacaacgctggatcaatgatgccccctcccagcaaacccatcactcgatctgctcctgtctctcaagtcgggtccccggacatttcgcccccgcactctttctccaactatgccaaccacatgcgctcgaatctgagcccctactctcgtaccagtgaacgggcgtcatcaggcatggatatcaaccttcttgctacggccgcgtctcaagtcgagcgtgatgaaagttttggattccgctctggtcaacgtagtcaccatatgtatggtccccgccatggcagcaggggacttccttctctttcagcctacgccatctcccacagcatgagccgttcccattcgcacgaggatgaggattcttatgcgtcacatcgcgtcaagcgttcaagacctaactcacccaactcgactgctccttcttcgcctaccttctcccacgactccttatctcccactcctgaccacacgccattggctacgcccgcccattcgccacgactgaagccattgtcgccgagtgagctacatctgccctcaatccgtcacctatcgcttcaccacactccggctctcgctccaatggagccccaggccgagggacccaattattataacccgaaccaacctcatgttggcccaagcataagcgatatcatgtctcgccctgagggtgcacagcgaaaacttccgatacctcaggtgcccaaagtggcggtccaggatatgttaaatcctagcgggtttacttcagtctcttcatcaaccgcaaattccgttgctggtggtgacttggctgagaggttctaa

SEQ ID NO: 80 - protein, 416 aa, Aspergillus nidulans
MPQPGSSVDFSNLLNPQNNTAIPAEVSNATASATMASGASLLPPMVKGARPAAEEARQDLPRPYKCPLCERAFHRLEHQTRHIRTHTGEKPHACQFPGCSKRFSRSDELTRHSRIHNNPNSRRGNKAQHLAAAAAAAAANQDGSAMANNAGSMMPPPSKPITRSAPVSQVGSPDISPPHSFSNYANHMRSNLSPYSRTSERASSGMDINLLATAASQVERDESFGFRSGQRSHHMYGPRHGSRGLPSLSAYAISHSMSRSHSHEDEDSYASHRVKRSRPNSPNSTAPSSPTFSHDSLSPTPDHTPLATPAHSPRLKPLSPSELHLPSIRHLSLHHTPALAPMEPQAEGPNYYNPNQPHVGPSISDIMSRPEGAQRKLPIPQVPKVAVQDMLNPSGFTSVSSSTANSVAGGDLAERF

SEQ ID NO: 81 - DNA, 1689 bp, Saccharomyces cerevisiae
atgtcactcctttacatcattcttctattcacacaattcttactactgccaaccgatgcctttgataggtctgctaacacaaatattgctgtttattggggtcaaaactcagcaggaacgcaagaatccttagctacttactgtgaatcttctgatgctgatattttcctattatctttcttgaaccaatttccaacccttggtttgaactttgccaacgcatgctctgatactttttctgatggcttacttcactgcacccagattgctgaagatattgaaacttgccagtccctaggaaagaaagttctattatcattaggtggtgcatctggtagctacctcttttcagatgattctcaagcggaaacttttgcacaaactttatgggatactttcggtgaaggtacaggtgccagtgagagaccatttgactcagcagtcgttgatggttttgattttgatattgaaaacaacaacgaagtaggctatagtgcgttagctaccaagttaagaactttgtttgccgaaggtacaaagcaatattacctttctgccgcaccacaatgtccatacccggatgcttctgttggtgacttgttggaaaatgcagacattgattttgcgttcatccaattttacaataattactgcagtgtgagtggtcaattcaattgggatacttggttaacctatgctcaaactgtatccccaaataaaaatatcaaactgttcttaggtttacctggttctgcttctgctgctggctctggttatatttctgacacttctttattggaatcaactattgcagatattgcctcttcaagttcttttggtggtattgcgttatgggatgcatctcaagccttttccaacgagctaaatggtgaaccatatgttgagattttgaagaatttgctaacaagtgctagccagaccgccactactacagttgccacctcaaaaacctcagcagcctcaacttcatctgcttcaacttcatctgcttcaacttctcagaaaaagaccacacaatctacgacatctacacaaagtaaaagcaaagttactttatctccaactgcaagcagcgctatcaaaacatcaattactcaaactacaaaaacattgacgagtagcaccaagacaaaatctagtctaggtaccaccacaacagagagcactttaaattcagttgctatcacaagtatgaaaactactctatcttcccaaataaccagtgctgccttggtgacccctcaaacaactactactagcatagtttcttcggccccaattcaaacagctatcactagtactctttcgccagcaacgaagagttcttctgtcgtttccctacagacagctactactagtacgctttccccaacaacgaccagtacaagctcaggtagtacaagctcaggtagtacaagctcagacagtacagctcgtacattggctaaagaattgaatgctcaatatgcggctggtaaattgaacggtaaatctacctgtactgaaggtgaaattgcatgctctgctgatgggaagttcgccgtttgtgatcatagcgcttgggtttacatggaatgtgcttctggaaccacatgttatgcttatgactccggcgactcagtctatacccaatgtaatttctcttatttggaaagcaattacttttaa

SEQ ID NO: 82 - protein, 562 aa, Saccharomyces cerevisiae
MSLLYIILLFTQFLLLPTDAFDRSANTNIAVYWGQNSAGTQESLATYCESSDADIFLLSFLNQFPTLGLNFANACSDTFSDGLLHCTQIAEDIETCQSLGKKVLLSLGGASGSYLFSDDSQAETFAQTLWDTFGEGTGASERPFDSAVVDGFDFDIENNNEVGYSALATKLRTLFAEGTKQYYLSAAPQCPYPDASVGDLLENADIDFAFIQFYNNYCSVSGQFNWDTWLTYAQTVSPNKNIKLFLGLPGSASAAGSGYISDTSLLESTIADIASSSSFGGIALWDASQAFSNELNGEPYVEILKNLLTSASQTATTTVATSKTSAASTSSASTSSASTSQKKTTQSTTSTQSKSKVTLSPTASSAIKTSITQTTKTLTSSTKTKSSLGTTTTESTLNSVAITSMKTTLSSQITSAALVTPQTTTTSIVSSAPIQTAITSTLSPATKSSSVVSLQTATTSTLSPTTTSTSSGSTSSGSTSSDSTARTLAKELNAQYAAGKLNGKSTCTEGEIACSADGKFAVCDHSAWVYMECASGTTCYAYDSGDSVYTQCNFSYLESNYF

SEQ ID NO: 83 - DNA, 921 bp, Saccharomyces cerevisiae
atgaattataactgcgaaatacaaaacaggaacagtaagaatgttgacaatcaagtcagtctaccccctatccaagttctatttaactccatagaaaaacggagtatgcccgagttggcattttcgaacatagaatactcgcatgggaaccttcggtctagtaccgaggaacaaaactatcctgcgcctgtgttacttccacagcatcattcgattgcgtatcccgcaattaattctggcggtactagtactactgctactcctactgcttctacagttgaaacgtccaagacgagtagcagtgctatggatacacaatctcaatatggcagttcaaagaagtcaaaatcggcgtccgatgatgcaaagccctgctacaaatccgccccaatatatgaaataatcaataaggaaaaggatgcgggggcacaatacaacaggccattttcggattttgtagaatctaaatcaaggaggaagcaaaattcgggcaggaggtctaacctgccaaaggaaacagtgcagatactgaatacttggttgctgaaccacctgaataacccctacccaactcaacaagaaaagagggagttgttaatcaaaactgggctaaccaagattcaactttctaattggttcataaatgtgagaagacgcaaaatatttagtgattactataccctggtaaactcaattcctaatgacaacgcgaataataccccagtggaacgagttcaaaacgtctcagcatatcataacacattatctgccacaaataatactatgtacgatgctacgtcaacctgctccacggattatgaattatccaagagatttgctcatgcccccgttacacgccgtaaaaaactaattgataggctggaagaattgaaaaagctatccaaccctgatatgaattga

SEQ ID NO: 84 - protein, 306 aa, Saccharomyces cerevisiae
MNYNCEIQNRNSKNVDNQVSLPPIQVLFNSIEKRSMPELAFSNIEYSHGNLRSSTEEQNYPAPVLLPQHHSIAYPAINSGGTSTTATPTASTVETSKTSSSAMDTQSQYGSSKKSKSASDDAKPCYKSAPIYEIINKEKDAGAQYNRPFSDFVESKSRRKQNSGRRSNLPKETVQILNTWLLNHLNNPYPTQQEKRELLIKTGLTKIQLSNWFINVRRRKIFSDYYTLVNSIPNDNANNTPVERVQNVSAYHNTLSATNNTMYDATSTCSTDYELSKRFAHAPVTRRKKLIDRLEELKKLSNPDMN

SEQ ID NO: 85 - DNA, 6081 bp, Saccharomyces cerevisiae
atgtcatcaaaacctgatactggttcggaaatttctggccctcagcgacaggaagaacaagaacaacagatagagcagagctcacctacggaagcaaacgatagaagcattcatgatgaggtaccaaaagtcaagaagcgtcacgaacaaaatagtggtcacaaatcaagaaggaatagcgcatatagttattacagcccacggtcgctttctatgaccaaaagcagggagagtatcactccaaatggtatggatgatgtaagtatttcgaacgtggaacatccaaggccgacagaaccgaaaatcaaaaggggtccatatttactgaagaaaacattgagcagtctttcaatgacgagcgcgaatagtactcatgatgataataaagaccacggttacgctttgaattcatccaagacgcacaactacacatctactcataaccatcatgacggtcatcatgatcatcatcatgttcagttttttcccaataggaagccatcattagcggaaaccctattcaaaaggttttcagggtcaaacagtcacgatggcaataagtcaggaaaggaaagtaaagttgctaacctttccctttcaacggtaaatcctgcacctgctaataggaaaccttctaaagactccactttatctaatcacttggctgataacgtgccaagcactttacgaaggaaagtgtcctcattggtacgtggttcttccgtccatgatataaataatggtattgcagataaacagattagaccaaaggctgttgcgcaatcagaaaatacattacattcatccgatgttcccaatagcaaacgctcgcacagaaaaagctttctgctaggctccacatcttcttcaagcagtagaagaggttcaaatgtcagttcaatgactaacagtgacagtgcaagtatggcgacgtcgggtagtcatgttctccaacataacgtatctaatgtttctccaactactaaaagtaaggacagcgttaacagcgaatccgccgatcacactaataataaatccgagaaagtgactccagaatataatgagaacattccggaaaattctaactctgacaacaaacgcgaagccacaacgcctactatagaaacacccatttcatgtaaaccatcccttttcaggctagatacaaaccttgaggatgttactgatattacaaagacggtgccacccaccgctgtcaattctacactaaattctacacacgggactgagactgcctcacccaaaacggtgatcatgcctgaaggtcctaggaagtcggtgtcaatggctgatctctccgtcgctgccgcagcacctaatggtgaattcacatcaacttccaatgatagatcacaatgggtagcacctcaaagctgggatgtggaaaccaaaaggaaaaaaacaaaacctaaagggagatcgaaatcaagaaggtcaagtatagatgctgatgaacttgatcccatgtcaccggggccaccttcaaaaaaagactctcgtcatcatcacgatcgaaaggataacgaatcaatggtcactgcgggtgacagtaactcaagttttgttgatatatgtaaagaaaacgttccgaatgatagcaagaccgcactcgatactaaatctgtgaaccgcttaaaaagtaatttggctatgagtcccccaagtatacgatatgctccatcaaatttagatggggactacgacacgtcttccacttcctcatctttaccgtcctcatctattagttcagaagatacatcttcctgcagcgattcctcttcgtacactaacgcgtatatggaggccaaccgagagcaggataataaaacaccgatcctgaataaaacgaaatcgtataccaagaaatttacatcctcttcggtaaatatgaattcaccagatggtgcccagagttctggattattactacaagatgagaaggacgatgaggtcgagtgccaactggaacattactataaagatttcagtgatttagatccaaagaggcactatgctattcgtatattcaatactgatgacacttttacgactctctcatgtactccagcgactaccgtcgaagagataatacctgcacttaaaagaaaatttaacattacagcgcaagggaattttcaaatttccctgaaggtgggaaagttgtcaaaaattttgagaccaacttcgaaacctattttaattgaaagaaaacttttacttttgaatggttatcgaaagtcagacccacttcatattatgggtatagaggatttaagttttgtttttaagtttcttttccatcctgtcacaccttctcactttactcctgaacaagaacaaagaataatgagaagcgaatttgttcacgtagatttaaggaatatggatctgactacacctcccatcattttttaccagcatacgtcagaaatagaaagtttagacgtttctaataacgcaaatatattcctacctctggagttcattgaaagctcgattaaattattaagtttgagaatggttaatattagagcatctaaatttccttccaatatcactaaggcgtataaactagtatctttggaattacagagaaacttcataagaaaagtaccgaactcaatcatgaaactgagtaatttaacgatattaaaccttcaatgtaatgagcttgaaagcctaccggctggatttgttgaactgaaaaatctgcaattgctagacttgtcttcaaacaagttcatgcactacccagaagttattaactactgcaccaatcttttacaaatagacctatcatataataaaatccaaagcttaccacagtccactaagtacctagtaaagcttgcgaagatgaacctttctcataacaaactaaattttataggcgacttatcggaaatgacagatttgaggacgctgaacctaagatataacagaatatcatcaattaagacaaatgcgtctaacttgcagaacctttttttaacagataatagaatttcgaactttgaagacactttgccgaaactaagagcccttgaaattcaagagaatccaatcacttctatatccttcaaagatttttatccaaaaaacatgacaagtttgacgttgaacaaggcacagttatcgagtattcctggagaattactcaccaaactatctttcctcgagaaacttgaacttaatcagaataatttgactagactgccacaggagatatccaagttgactaaattagttttcctttcagtggcgagaaacaaactagagtatattccacccgagctatctcaactgaaaagtttgaggacattagatctacattctaacaacataagggactttgttgacggtatggaaaaccttgaactaacatcgctaaatatttcatcgaatgcattcggtaactctagcttagaaaattctttttaccataacatgtcatatgggtcaaagttatctaaaagcctgatgttttttattgctgcagacaatcaatttgatgatgctatgtggcctcttttcaattgctttgtcaatctgaaagtgctaaatctttcttacaacaatttttcagatgtatcgcacatgaaacttgagagcattaccgaattgtacctctccggtaataagctcacgacattgtcgggtgatacagttttgaaatggagctctttaaagactttaatgttgaatagtaaccaaatgttatctctgcctgcagaattatcaaatctctcacagctaagtgtatttgatgttggagcaaatcaattaaagtataatatatcaaactatcattacgattggaactggaggaataataaagaactaaaatatttgaatttttcaggaaatcgaaggtttgaaataaagtcatttataagtcacgatattgatgctgatttgtcagatctgacagtattacctcagttaaaggtactaggtttaatggacgtaactttaaatactaccaaagtaccggatgaaaatgtcaatttccgtttaaggacaactgcatcaataataaatgggatgcgctacggtgttgctgatacattaggtcaaagagactatgtgtcatctcgtgatgttacctttgaaagattccgcggaaatgacgacgaatgcttactatgtcttcatgatagtaaaaaccaaaatgcagattatggccacaatatatcaagaattgttagagatatttacgataaaatactgatcagacaactggaaaggtatggagacgaaacagatgataatataaaaactgcacttcgtttcagttttttgcaactgaataaggagattaacggaatgctaaattctgttgataatggtgccgatgttgccaatctttcatatgcagacttgctaagtggcgcttgctctactgtgatatatatcagagggaagaaactcttcgctgcaaatttaggtgactgtatggctattttatccaaaaacaatggtgactaccaaacgctaaccaaacaacatctcccaacaaagcgggaagaatacgagaggatcagaatatctggcgggtatgtcaacaatggaaaattagatggtgttgtagatgtgtctagagcagtgggtttttttgatttgcttccccacattcatgcttctcccgacatatctgtcgtgacattaacaaaagcagacgagatgcttattgtagcaacgcataagttatgggaatacatggacgtggatacagtttgtgatatcgcgcgtgagaatagtactgatccactccgtgccgcagctgagttgaaggatcatgccatggcttacggctgtacagagaatattacaattttgtgccttgctctttacgagaacattcagcaacaaaatcggttcactttaaataaaaactctttaatgactagaagaagtactttcgaggatactacattaagaagacttcaacctgagatttctccgccaacaggtaacctagcaatggtcttcactgatatcaaaagctcaaccttcttatgggagctattccctaacgcaatgaggaccgcaataaaaactcacaatgacattatgcgtcgtcaactacgaatttacggtggttacgaagtaaagacagaaggagacgcctttatggtggcatttcctacgccaactagtggtctgacatggtgcttaagtgttcaattaaaactcttggatgcacaatggccggaggaaattacctcagttcaagacggctgccaagttacggatagaaatggtaacattatctatcaaggcctatcagttagaatgggtattcattggggctgcccagttccagagcttgatttagtgactcaaagaatggactatttggggccgatggtcaataaggcagcaagggtccagggcgtcgctgacggtggtcagattgcaatgagtagtgatttttactctgaattcaacaagataatgaagtatcatgagcgagtagtgaagggcaaggaatctctcaaggaagtttatggtgaagaaattatcggagaggttcttgaaagagaaattgccatgctggaaagtattggttgggcattttttgactttggcgagcataagctaaagggactcgaaaccaaagaactcgttactattgcgtatcctaagattcttgcttccagacacgaatttgcatctgaagatgagcagtcaaaattaatcaatgaaacgatgttgtttcgtttaagagtcatttcaaacagactggaatctataatgtcagctttaagcggcggatttattgaactagactctcggacggagggaagttatattaaatttaaccctaaagttgaaaatggtattatgcaatcgatttctgagaaggatgcgttgttattttttgatcatgtaattactagaatcgaatccagtgtggcattattacatttacgacaacagaggtgttcaggactggaaatttgcagaaacgataaaacatctgctcgaagcaatattttcaatgttgttgacgaacttttacaaatggttaagaacgcaaaggatttatcaacttga

SEQ ID NO: 86 - protein, 2026 aa, Saccharomyces cerevisiae
MSSKPDTGSEISGPQRQEEQEQQIEQSSPTEANDRSIHDEVPKVKKRHEQNSGHKSRRNSAYSYYSPRSLSMTKSRESITPNGMDDVSISNVEHPRPTEPKIKRGPYLLKKTLSSLSMTSANSTHDDNKDHGYALNSSKTHNYTSTHNHHDGHHDHHHVQFFPNRKPSLAETLFKRFSGSNSHDGNKSGKESKVANLSLSTVNPAPANRKPSKDSTLSNHLADNVPSTLRRKVSSLVRGSSVHDINNGIADKQIRPKAVAQSENTLHSSDVPNSKRSHRKSFLLGSTSSSSSRRGSNVSSMTNSDSASMATSGSHVLQHNVSNVSPTTKSKDSVNSESADHTNNKSEKVTPEYNENIPENSNSDNKREATTPTIETPISCKPSLFRLDTNLEDVTDITKTVPPTAVNSTLNSTHGTETASPKTVIMPEGPRKSVSMADLSVAAAAPNGEFTSTSNDRSQWVAPQSWDVETKRKKTKPKGRSKSRRSSIDADELDPMSPGPPSKKDSRHHHDRKDNESMVTAGDSNSSFVDICKENVPNDSKTALDTKSVNRLKSNLAMSPPSIRYAPSNLDGDYDTSSTSSSLPSSSISSEDTSSCSDSSSYTNAYMEANREQDNKTPILNKTKSYTKKFTSSSVNMNSPDGAQSSGLLLQDEKDDEVECQLEHYYKDFSDLDPKRHYAIRIFNTDDTFTTLSCTPATTVEEIIPALKRKFNITAQGNFQISLKVGKLSKILRPTSKPILIERKLLLLNGYRKSDPLHIMGIEDLSFVFKFLFHPVTPSHFTPEQEQRIMRSEFVHVDLRNMDLTTPPIIFYQHTSEIESLDVSNNANIFLPLEFIESSIKLLSLRMVNIRASKFPSNITKAYKLVSLELQRNFIRKVPNSIMKLSNLTILNLQCNELESLPAGFVELKNLQLLDLSSNKFMHYPEVINYCTNLLQIDLSYNKIQSLPQSTKYLVKLAKMNLSHNKLNFIGDLSEMTDLRTLNLRYNRISSIKTNASNLQNLFLTDNRISNFEDTLPKLRALEIQENPITSISFKDFYPKNMTSLTLNKAQLSSIPGELLTKLSFLEKLELNQNNLTRLPQEISKLTKLVFLSVARNKLEYIPPELSQLKSLRTLDLHSNNIRDFVDGMENLELTSLNISSNAFGNSSLENSFYHNMSYGSKLSKSLMFFIAADNQFDDAMWPLFNCFVNLKVLNLSYNNFSDVSHMKLESITELYLSGNKLTTLSGDTVLKWSSLKTLMLNSNQMLSLPAELSNLSQLSVFDVGANQLKYNISNYHYDWNWRNNKELKYLNFSGNRRFEIKSFISHDIDADLSDLTVLPQLKVLGLMDVTLNTTKVPDENVNFRLRTTASIINGMRYGVADTLGQRDYVSSRDVTFERFRGNDDECLLCLHDSKNQNADYGHNISRIVRDIYDKILIRQLERYGDETDDNIKTALRFSFLQLNKEINGMLNSVDNGADVANLSYADLLSGACSTVIYIRGKKLFAANLGDCMAILSKNNGDYQTLTKQHLPTKREEYERIRISGGYVNNGKLDGVVDVSRAVGFFDLLPHIHASPDISVVTLTKADEMLIVATHKLWEYMDVDTVCDIARENSTDPLRAAAELKDHAMAYGCTENITILCLALYENIQQQNRFTLNKNSLMTRRSTFEDTTLRRLQPEISPPTGNLAMVFTDIKSSTFLWELFPNAMRTAIKTHNDIMRRQLRIYGGYEVKTEGDAFMVAFPTPTSGLTWCLSVQLKLLDAQWPEEITSVQDGCQVTDRNGNIIYQGLSVRMGIHWGCPVPELDLVTQRMDYLGPMVNKAARVQGVADGGQIAMSSDFYSEFNKIMKYHERVVKGKESLKEVYGEEIIGEVLEREIAMLESIGWAFFDFGEHKLKGLETKELVTIAYPKILASRHEFASEDEQSKLINETMLFRLRVISNRLESIMSALSGGFIELDSRTEGSYIKFNPKVENGIMQSISEKDALLFFDHVITRIESSVALLHLRQQRCSGLEICRNDKTSARSNIFNVVDELLQMVKNAKDLST

SEQ ID NO: 87 - DNA, 1860 bp, Saccharomyces cerevisiae
atgatcataagattgcatttttactacctcctcactttagtttaccatttaggacttgtaggtgcgtatgaaaaagcagcaagaaagagaattcaacctcccgatttgatacctggtcctccgggacataaacttggtgatgaaagaccaccgcattacgaccaccggccaccttataaaaaacacatcgacaacattccagcttacaatctgactgatttgatagatgataaactactaaataaatatgaaaactcatgcacggtaaatgtattgacaggtggcttcatctctctagcaagtaattcgtggcacttacgtgcttataattacactttaaattacccatcctttttgatccgatgcgataatggcagtgcaaatcctaatttctctcatgtcttacaagactttgtttatgacatcaacaacaaattcaacgttcaagatgacagtagtaaatacatcggaaaagacccatttcccttaggaatgataatgatcacctttgcttctgggtgtatctgtgtggcaacatggatgctatttttggttgtcttattactgccatccgataatcataatagaagaaataaagttgtacatgtttacgtccttttctctgcgattataagaactgtatttctaaacgagactatagccgtcatatttgacagccaatatcacgatgactaccaggatgcgagccaatttgaatcgttcatcgtagaaactgcaccatataaaatatgtgaattagttgcaaatattttgagtgatataaactggatttatattgttcactacttacagtccaattatggaaaaccaacttggaattggatcccatttaaaatgaaaaaggggacacatatcataattaccgtgggttgcttcctctcactagccgataacattttattcgcaaaccttctttggagaaagaaccttgtagttttgaaggtattttacaagctaatcgaattactgatttacacaattttcatctccattatttgttacttcacatggcataattttgcttacatacttttaccgaaaactgctgaaattaatacggacggtaagtgtaaaacgaaattgagaattctttgggaaaattatcacgaaactataccattattggcgtataatattcttatatttattttattctatttcaccacaatttttttcgctgctttcaccaaacatgttagaggttggacatttaactttgttcatcttttgaaagttttaataacagtgaacgtttggggcttaattggagtattggaaaagagggagctgcacataagcaaaaaaacagtccttggacgaaaaattaacaatagggacaaatttttcgccaatccaacagtcaattattacggagaagatttaggcaagcatttaagcgccataacgttaaacagggatttaaacactactaaaagtaacactacttcccacgattcatcaagtttagtaggatccccttcacccacctggaaatctccaatcgaaagaataagggacagaagaagaagacataagataatgaaaagtgagaataaatttgggcaaaatcccagttttggaagtaaatcgaatggcaaacctaatactaaaacgacattatccaaatatcgacagctattaaggaagcctaggcgaaaaaccaattcatatgaaccaaaaaatggcattggacagaataaagaaggctcaactgttagaccaggagccgacaaacatattagagattccaattatctagctacagacatcagtgacaacgaaagtatggaaaccgaacttcgaaccaaccacatttataattacgaaaatagtgattaa

SEQ ID NO: 88 - protein, 619 aa, Saccharomyces cerevisiae
MIIRLHFYYLLTLVYHLGLVGAYEKAARKRIQPPDLIPGPPGHKLGDERPPHYDHRPPYKKHIDNIPAYNLTDLIDDKLLNKYENSCTVNVLTGGFISLASNSWHLRAYNYTLNYPSFLIRCDNGSANPNFSHVLQDFVYDINNKFNVQDDSSKYIGKDPFPLGMIMITFASGCICVATWMLFLVVLLLPSDNHNRRNKVVHVYVLFSAIIRTVFLNETIAVIFDSQYHDDYQDASQFESFIVETAPYKICELVANILSDINWIYIVHYLQSNYGKPTWNWIPFKMKKGTHIIITVGCFLSLADNILFANLLWRKNLVVLKVFYKLIELLIYTIFISIICYFTWHNFAYILLPKTAEINTDGKCKTKLRILWENYHETIPLLAYNILIFILFYFTTIFFAAFTKHVRGWTFNFVHLLKVLITVNVWGLIGVLEKRELHISKKTVLGRKINNRDKFFANPTVNYYGEDLGKHLSAITLNRDLNTTKSNTTSHDSSSLVGSPSPTWKSPIERIRDRRRRHKIMKSENKFGQNPSFGSKSNGKPNTKTTLSKYRQLLRKPRRKTNSYEPKNGIGQNKEGSTVRPGADKHIRDSNYLATDISDNESMETELRTNHIYNYENSD

SEQ ID NO: 89 - DNA, 1521 bp, Saccharomyces cerevisiae
atgggttccatcaataataacttcaacactaataataacagtaatacggatctcgatcgggactggaaaactgcattgaatattcccaagaaggataccagaccacagacagatgatgtcttaaatacaaagggtaatacttttgaagatttttatttgaaaagagagctgttaatgggtatttttgaagccggttttgaaaaaccatcccctattcaagaagaggctattccggtagcaataactggtagagacatattggccagagcaaagaatggtacaggtaagacagccgcatttgttattcctacgttagagaaagtcaaaccaaagttgaataaaattcaggctttgatcatggttcccacaagagagttagctctgcaaacttcccaagtcgtccgtacattgggaaaacactgtggtatttcatgtatggtgaccactggtggtaccaatttgagagacgatattctaagattaaatgaaacagtccatattttggttggtactcctggtagagtgttggatttagcttcgagaaaagtagcagatctgtctgattgttcattattcatcatggacgaagccgataaaatgttatctcgtgacttcaagacaataattgaacaaatcttatccttcttacctccaactcaccaatctttattatttagcgctactttcccactaacggttaaggaattcatggttaaacatctgcataagccttatgaaattaatttgatggaagaattgactctaaagggtattactcaatactacgcctttgttgaagaaagacaaaagctacattgtttaaatactttattctctaagcttcaaattaatcaagccattattttttgtaattctactaaccgtgtcgaattactagccaagaaaatcactgatttaggctattcctgttattactctcatgcaagaatgaagcaacaagaaagaaataaagttttccacgaatttcgtcaaggtaaggttcgtacattggtctgctccgatttattgacccgtggtatcgatattcaagccgttaatgtcgttatcaatttcgatttccccaaaacggcagaaacatatttacatcgtattggtagatccggtaggtttggccacttgggtttagcaatcaatttgattaactggaatgatcggtttaacctttataaaatcgaacaagaactgggcactgaaattgcggctattccggccactatcgataagtcattgtatgtggctgaaaatgacgaaacggtacctgtcccattcccgatagagcaacagagctatcatcaacaagcgatacctcagcaacaattaccatctcagcaacaatttgctattcctccgcagcaacatcatccacaattcatggttcctccttcgcatcagcaacaacaggcgtatcctccaccgcaaatgccatcgcagcaggggtatcctccacagcaggaacatttcatggcgatgccacctggtcagtcacaaccccagtattaa

SEQ ID NO: 90 - protein, 506 aa, Saccharomyces cerevisiae
MGSINNNFNTNNNSNTDLDRDWKTALNIPKKDTRPQTDDVLNTKGNTFEDFYLKRELLMGIFEAGFEKPSPIQEEAIPVAITGRDILARAKNGTGKTAAFVIPTLEKVKPKLNKIQALIMVPTRELALQTSQVVRTLGKHCGISCMVTTGGTNLRDDILRLNETVHILVGTPGRVLDLASRKVADLSDCSLFIMDEADKMLSRDFKTIIEQILSFLPPTHQSLLFSATFPLTVKEFMVKHLHKPYEINLMEELTLKGITQYYAFVEERQKLHCLNTLFSKLQINQAIIFCNSTNRVELLAKKITDLGYSCYYSHARMKQQERNKVFHEFRQGKVRTLVCSDLLTRGIDIQAVNVVINFDFPKTAETYLHRIGRSGRFGHLGLAINLINWNDRFNLYKIEQELGTEIAAIPATIDKSLYVAENDETVPVPFPIEQQSYHQQAIPQQQLPSQQQFAIPPQQHHPQFMVPPSHQQQQAYPPPQMPSQQGYPPQQEHFMAMPPGQSQPQY

SEQ ID NO: 91 - DNA, 249 bp, Saccharomyces cerevisiae
atgtcaacatatgacgaaatcgaaatcgaagatatgacgtttgagcctgaaaatcaaatgttcacctatccttgtccctgtggagataggtttcaaatatatctggatgacatgtttgagggcgaaaaagttgctgtttgtcccagctgctcactgatgatcgatgtagttttcgataaagaagacttggctgagtactacgaagaggcaggcatccacccccctgagcctattgccgctgctgcctaa

SEQ ID NO: 92 - protein, 82 aa, Saccharomyces cerevisiae
MSTYDEIEIEDMTFEPENQMFTYPCPCGDRFQIYLDDMFEGEKVAVCPSCSLMIDVVFDKEDLAEYYEEAGIHPPEPIAAAA

SEQ ID NO: 93 - DNA, 1923 bp, Saccharomyces cerevisiae
atgtcacctcgacagcttataccgacattaattccggaatgggcaccattatcccagcaatcgtgcataagagaggatgagttagatagtcccccgataacgcctacgagccagacatcttcatttggttcttctttttctcaacagaaaccaacctatagtacaattataggagaaaatatacacacgatcctggatgaaattcgaccatatgtgaaaaaaataactgttagtgaccaagataagaaaactataaaccaatatacgctaggagtctctgcaggaagtggacaatttggttatgtacgaaaagcgtacagttctactttaggcaaggttgttgctgtcaagattataccaaaaaaaccttggaatgcccagcaatattcagtaaatcaagtaatgaggcaaatccagctttggaagagtaaaggaaaaataacgacaaatatgagtggtaatgaggctatgagacttatgaatatcgaaaaatgtaggtgggaaatttttgcggcttcaagacttcgaaataatgttcatattgtgcgactaatagaatgcttggactctcctttcagcgaatctatctggatagtcactaattggtgcagccttggtgaactacagtggaaacgtgacgatgatgaagatattttaccgcaatggaaaaaaattgtgatttcaaattgtagtgtttctacatttgccaaaaaaatcctggaggatatgacaaaagggttggaatatttgcattctcagggttgtattcatcgtgatatcaaaccgtccaatattttattggatgaagaagaaaaagtagcgaaactttctgattttggaagttgtattttcactccccaatcattacctttcagcgatgctaattttgaagattgttttcagagggaattgaacaaaattgttggtactccggcatttattgcaccagagctatgtcatttgggcaattccaaaagagattttgtgacggatggctttaagttggatatttggtcattgggagtgacactatactgcttactgtacaacgagctgccatttttcggggaaaatgaattcgaaacctaccacaaaatcatcgaagtatcattgagttccaaaataaatggtaatactttaaacgatttagtcattaaaaggttattggagaaagacgttactttacgcataagtattcaggatttagtaaaggttttgtcgcgtgaccagcccatagattctaggaatcacagtcaaatttcatcgtccagtgtgaaccccgtaagaaacgaaggtcctgtaagaagattttttggtaggctactgactaaaaaaggaaagaaaaagacctcaggaaaagggaaagacaaggtattggtatctgcaactagtaaagtaacaccttcgatacatatcgacgaggaaccggataaagaatgtttttcgactacggtccttagatcttcgccagactcgagcgattattgttcatcgttaggggaggaagccattcaggttacggatttcttagatactttttgtaggtcaaatgaaagcttacctaatttgactgtgaataatgataagcagaattcggacatgaaaactgacagaagcgagtcatcctctcattcgtcattgaaaatcccaacacctatcaaagccatgataagactaaagagttcccctaaagagaacgggaacagaacccatattaattgctcacaggacaaaccgagttccccactaatggataggactgttggaaagcgcacggttaacaattcaggggctagaaagcttgctcattcaagtaatattctcaactttaaagcatacataaattcggaagatagtgacattcgagaaacagtagaagatgtaaaaacgtatctgaactttgcagataatggtcaaatatag

SEQ ID NO: 94 - protein, 640 aa, Saccharomyces cerevisiae
MSPRQLIPTLIPEWAPLSQQSCIREDELDSPPITPTSQTSSFGSSFSQQKPTYSTIIGENIHTILDEIRPYVKKITVSDQDKKTINQYTLGVSAGSGQFGYVRKAYSSTLGKVVAVKIIPKKPWNAQQYSVNQVMRQIQLWKSKGKITTNMSGNEAMRLMNIEKCRWEIFAASRLRNNVHIVRLIECLDSPFSESIWIVTNWCSLGELQWKRDDDEDILPQWKKIVISNCSVSTFAKKILEDMTKGLEYLHSQGCIHRDIKPSNILLDEEEKVAKLSDFGSCIFTPQSLPFSDANFEDCFQRELNKIVGTPAFIAPELCHLGNSKRDFVTDGFKLDIWSLGVTLYCLLYNELPFFGENEFETYHKIIEVSLSSKINGNTLNDLVIKRLLEKDVTLRISIQDLVKVLSRDQPIDSRNHSQISSSSVNPVRNEGPVRRFFGRLLTKKGKKKTSGKGKDKVLVSATSKVTPSIHIDEEPDKECFSTTVLRSSPDSSDYCSSLGEEAIQVTDFLDTFCRSNESLPNLTVNNDKQNSDMKTDRSESSSHSSLKIPTPIKAMIRLKSSPKENGNRTHINCSQDKPSSPLMDRTVGKRTVNNSGARKLAHSSNILNFKAYINSEDSDIRETVEDVKTYLNFADNGQI

SEQ ID NO: 95 - DNA, 1152 bp, Saccharomyces cerevisiae
atgagtgaaacagaattgagaaaaagacaggcccaattcactagggagttacatggtgatgatattggtaaaaagacaggtttgagtgcattgatgtcgaagaacaactctgcccaaaaggaagccgttcagaagtacttgagaaattgggatggtagaaccgataaagatgccgaagaacgtcgtcttgaggattataatgaagccacacattcctactataacgtcgttacagatttctatgaatatggttggggttcctctttccatttcagcagattttataaaggtgagagtttcgctgcctcgatagcaagacatgaacattatttagcttacaaggctggtattcaaagaggcgatttagttctcgacgttggttgtggtgttgggggcccagcaagagagattgcaagatttaccggttgtaacgtcatcggtctaaacaataacgattaccaaattgccaaggcaaaatattacgctaaaaaatacaatttgagtgaccaaatggactttgtaaagggtgatttcatgaaaatggatttcgaagaaaacactttcgacaaagtttatgcaattgaggccacatgtcacgctccaaaattagaaggtgtatacagcgaaatctacaaggttttgaaaccgggtggtacctttgctgtttacgaatgggtaatgactgataaatatgacgaaaacaatcctgaacatagaaagatcgcttatgaaattgaactaggtgatggtatcccaaagatgttccatgtcgacgtggctaggaaagcattgaagaactgtggtttcgaagtcctcgttagcgaagacctggcggacaatgatgatgaaatcccttggtattacccattaactggtgagtggaagtacgttcaaaacttagctaatttggccacatttttcagaacttcttacttgggtagacaatttactacagcaatggttactgtaatggaaaaattaggtctagccccagaaggttccaaggaagttactgctgctctagaaaatgctgcggttggtttagttgccggtggtaagtccaagttattcactccaatgatgcttttcgtcgctaggaagccagaaaacgccgaaaccccctcccaaacttcccaagaagcaactcaataa

SEQ ID NO: 96 - protein, 383 aa, Saccharomyces cerevisiae
MSETELRKRQAQFTRELHGDDIGKKTGLSALMSKNNSAQKEAVQKYLRNWDGRTDKDAEERRLEDYNEATHSYYNVVTDFYEYGWGSSFHFSRFYKGESFAASIARHEHYLAYKAGIQRGDLVLDVGCGVGGPAREIARFTGCNVIGLNNNDYQIAKAKYYAKKYNLSDQMDFVKGDFMKMDFEENTFDKVYAIEATCHAPKLEGVYSEIYKVLKPGGTFAVYEWVMTDKYDENNPEHRKIAYEIELGDGIPKMFHVDVARKALKNCGFEVLVSEDLADNDDEIPWYYPLTGEWKYVQNLANLATFFRTSYLGRQFTTAMVTVMEKLGLAPEGSKEVTAALENAAVGLVAGGKSKLFTPMMLFVARKPENAETPSQTSQEATQ

SEQ ID NO: 97 - DNA, 2604 bp, Aspergillus nidulans
atgccaggaattctccccatgaaagtgatcaaggtcggcaataacacgcagagtcgtattgcccaagcctgtgaccggtgtcgaagcaaaaagatccgctgcgacggtattcgcccatgctgcacacaatgtgccaacgtcggcttcgagtgcaaaaccagcgataaactcagtcgacgagcgtttccccgtggatacacagagtctctggaagaacgagtacggacactagaagctgaggtcagggaacttaagagtctcctggatgagaaggatgagaagattgatgtgctctctcggatacactctttctcctcaccttcacagcagaagactcctgctgctgtgcactctccgactcagcctcccccggctgctccaacgagtgtgcctacccccagtgagggagccgttcatgttccggatccggttgctttgagcagcacagaggagtccggggtttcgaacacccgtggctttgctgctgtcttcaccaacatgcttgcagaccaaggccggctagctccagaaacttccactaaagctttgtctgcttctcctactcctattactccttctcgtctcgaccagcctctgaaaacaacgcctcggcttgtatcggatcagcttatcaacattttctttcaagaatgggcacctctttacccggttgtccaccgacctaccatcctcaaggcatacgagcaatacctttccaattccgaacacattcaaggcaacaaacatgagatggcccagctgaatctgatctttgctgttgctgcactcggcgctatttcgagaaccaaccaggaccctaccctctttgaggagaattggtcttctattcttgagtcgttacatgccgacatttctatcccaaccttgcagtgttacgtgttggcacaaatgtattgcttgaccaagggtgactacacaaatgttctgcgctatcgtggtgtagctgttggcgtctgccaccaattgaaactacagaagagtcagaaggctttctcatcgaacgctcttcttgctgagaccaggaagaaagttttttggtgccaatatgttctggatcgtctttgcgcttctttgactggtcttcctgttcttcttcgcgaagagcacatccagactgagtatcccgaagatatcgatgatgagaacgtgacggaaaccggtttcttgcccaccttgcccggcgagtccacacgtatctccagcgccctcgccctgttttccgcatctagagttctgaacagcacgttggagaatatctacccgtctgacggtgcatacgaaatcccattgtcaaaaatgcgtttcgttacggaacagctcgataaatgggtcaagagcctacccgctcatcttcacttggagttcacacaggataagccgagcaccaacgtcattagcagtcggtctccacttttgtctgtgatgtattatttcattcgttctctcatccaccgtcctgccgtctgctttggtgacgatcacgttcgttcaccttcagtccttgcgattgcggattccggcaagcatatcatccaaattctccaactgcttgacgagaggcgcctatgtctctctcttagcatcaaccgaagagagctcatcagctccgcagggcttgggcttctctggcaaaatgtcggcctgaagcgtgatagcaaacttgtcaaagaaagtcaaaaggtgcttacaggcgttattgatcagcttgagtctgaatcatccgtggctgcgaccgagttcagtgctctagccggtgccctcgtttcattagataccaaacgaccaacgaccaccaaccctcaacaaatgagcccacccgcccaaaaacccttgaagtctccgaggagacagctggaggcatggaaggcccgcttgatcggcagcactagcccgggtcaatctcagccaaaaccggagcctctgtcacgcagaaacaccttttctggttcgagccctggtttagcggagcgccaattacgttctcctagttgggctagcctacctcccaacgacttcccgcaccatgccccgatgagcaagaacgtttacaaccaccctatggggtatgaaggcaatccgtccatgtcctgctcggtaccgacggaccatccagctccaccatcaggaaatctaacggtctcggactgggagttcgtggtgagcgatatggatcaaggctactcgaatatattcacaggaatctatggtggcaaagaatgcggcgaagatcacggcccttttgcgtctttgactgctgagtacatgcacaaacaaggacccggcctgccgccttctttaacttcaagcgatgaattgcaaggcctgtctccggaggcttggtctgccactagcagtagcgatatggctcaacctccagaacttgcagcacagagtgtctattcggacgggagtctgggaagcagagaccacagcttgtcacttccaagtactatgccttttccgatggaggataggccgggtagcctcttggatccacttcaaggcgttattatccctgctggagacgacgatattgaagaatttgggctggtcaacggttgggatcgacggctggccgtctag

SEQ ID NO: 98 - protein, 867 aa, Aspergillus nidulans
MPGILPMKVIKVGNNTQSRIAQACDRCRSKKIRCDGIRPCCTQCANVGFECKTSDKLSRRAFPRGYTESLEERVRTLEAEVRELKSLLDEKDEKIDVLSRIHSFSSPSQQKTPAAVHSPTQPPPAAPTSVPTPSEGAVHVPDPVALSSTEESGVSNTRGFAAVFTNMLADQGRLAPETSTKALSASPTPITPSRLDQPLKTTPRLVSDQLINIFFQEWAPLYPVVHRPTILKAYEQYLSNSEHIQGNKHEMAQLNLIFAVAALGAISRTNQDPTLFEENWSSILESLHADISIPTLQCYVLAQMYCLTKGDYTNVLRYRGVAVGVCHQLKLQKSQKAFSSNALLAETRKKVFWCQYVLDRLCASLTGLPVLLREEHIQTEYPEDIDDENVTETGFLPTLPGESTRISSALALFSASRVLNSTLENIYPSDGAYEIPLSKMRFVTEQLDKWVKSLPAHLHLEFTQDKPSTNVISSRSPLLSVMYYFIRSLIHRPAVCFGDDHVRSPSVLAIADSGKHIIQILQLLDERRLCLSLSINRRELISSAGLGLLWQNVGLKRDSKLVKESQKVLTGVIDQLESESSVAATEFSALAGALVSLDTKRPTTTNPQQMSPPAQKPLKSPRRQLEAWKARLIGSTSPGQSQPKPEPLSRRNTFSGSSPGLAERQLRSPSWASLPPNDFPHHAPMSKNVYNHPMGYEGNPSMSCSVPTDHPAPPSGNLTVSDWEFVVSDMDQGYSNIFTGIYGGKECGEDHGPFASLTAEYMHKQGPGLPPSLTSSDELQGLSPEAWSATSSSDMAQPPELAAQSVYSDGSLGSRDHSLSLPSTMPFPMEDRPGSLLDPLQGVIIPAGDDDIEEFGLVNGWDRRLAV

SEQ ID NO: 99 - DNA, 1554 bp, Candida albicans
atgtctgacgatcattcaatccattctcatacacagggacttcaccacatcaaaaagaaacgggtcgggaaagcgtgcgattcgtgccggatcaaaaaaaccaagtgtgacggtaaaaaaccttgcaacagatgtacattagacaacaagatttgtgtgttcacggaaaagaaaaaaaccaaagagaagaaacatccatctggttatgttgagcttttagaagcaagattagatatattaactagactgttggaaaaactaattgaattatcacgaccacatttacaatttattgacgatataattaccgaagaaaaactggtcgatcaagaaaaatcttctcctgcttcatcaacaccaaattcatcttctagtgaccaccatgacgatgttgaagaacagaattctactggtgtggttgctcctataaacaaagtagtctcatatctaattaaagaacaaggtctattgaaaaatataccccttgagtgggaacaagggactgagattgctgctaatttcgaccccaatagaaatttaaaactgtcgtcaagattatttgctgaacataaaggtgaagcttttattgggtcaccagtaacgtctcctcaacaaatgccaactagtaacccttttagaagaacctcaatgtttaaagaagaattggaatcaccttctagtgatcattacaatgaactgatattttcccaatcagtcgatgaaccttatatcaagaaggagcccaactcggctcagttttcaaaagggacattttctccacaacaacaacaactacagcaacagcagcaaatgttaaatcagttttccctcaatacttcccgtgatatatcagacatcgaaagtgattcatcaaacaaggaagatggattgaattctggttcggtatctccaccaacatccaactataggtcattttcattgttctctgatagtaatggtgaaccaatattgggcaaaacctcatcattgacgtcattaactaacaagtatgaaaatcattcactttcttcaccacaaaccgccataaacccagtattcaataattcaaccactggtccaatccttaccacattgagacgcaattcatcttcacattctcaaaagacccttggatctatacaacttcaacaaaaacctagaggaagtgttcataaaccagtgcgtaatcattctagagtttcgtcatttgataaacgaatggagtctacagctacagctgcggctactgtcgctgctgtttccggttcagtccaactactgcaaaatacaactccacagaatcttcctcatttggataatagtcaaaacaataattatttaagagacaatggtatgaataatattggtgctggcagtgttggtggtggtttgacttttggtgcacccagttttacacaaccattaagtccatctgatgatgctattgtttatcctacaaatcaatttactaatagaccagctacggtgtccacttttggtggtgggttagatgtgttggtggataattcattggatcctttcttcaatatttaa

SEQ ID NO: 100 - protein, 517 aa, Candida albicans
MSDDHSIHSHTQGLHHIKKKRVGKACDSCRIKKTKCDGKKPCNRCTLDNKICVFTEKKKTKEKKHPSGYVELLEARLDILTRSLEKLIELSRPHLQFIDDIITEEKSVDQEKSSPASSTPNSSSSDHHDDVEEQNSTGVVAPINKVVSYLIKEQGLLKNIPLEWEQGTEIAANFDPNRNLKSSSRLFAEHKGEAFIGSPVTSPQQMPTSNPFRRTSMFKEELESPSSDHYNESIFSQSVDEPYIKKEPNSAQFSKGTFSPQQQQLQQQQQMLNQFSLNTSRDISDIESDSSNKEDGLNSGSVSPPTSNYRSFSLFSDSNGEPILGKTSSLTSLTNKYENHSLSSPQTAINPVFNNSTTGPILTTLRRNSSSHSQKTLGSIQLQQKPRGSVHKPVRNHSRVSSFDKRMESTATAAATVAAVSGSVQLSQNTTPQNLPHLDNSQNNNYLRDNGMNNIGAGSVGGGLTFGAPSFTQPLSPSDDAIVYPTNQFTNRPATVSTFGGGLDVLVDNSLDPFFNI

SEQ ID NO: 101 - DNA, 5631 bp, Saccharomyces cerevisiae
atgaacactgatcaacaaccttatcagggccaaacggactatacccagggaccaggtaacgggcaaagtcaggaacaagactatgaccaatatggccagcctttgtatccttcacaagctgatggttactacgatccaaatgtcgctgctggtactgaagctgatatgtatggtcaacaaccaccaaacgagtcttacgaccaagactacacaaacggtgaatactatggtcaaccgccaaatatggctgctcaagacggtgaaaacttctcggattttagcagttacggccctcctggaacacctggatatgatagctatggtggtcagtataccgcttctcaaatgagttatggagaaccaaattcgtcgggtacctcgactccaatttacggtaattatgacccaaatgctatcgctatggctttgccaaatgaaccttatcccgcttggactgctgactctcaatctcccgtttcgatcgagcaaatcgaagatatctttattgatttgaccaacagactcgggttccaaagagactccatgagaaatatgtttgatcattttatggttctcttggactctaggtcctcgagaatgtctcctgatcaagctttactatctttacatgccgactacattggtggcgatactgctaactataaaaaatggtattttgctgctcagttagatatggatgatgaaattggttttagaaatatgagtcttggaaaactctcaaggaaggcaagaaaagctaagaagaaaaacaagaaagcaatggaagaggccaatcccgaagacactgaagaaactttaaacaaaattgaaggcgacaactccctagaggctgctgattttagatggaaggccaagatgaaccagttgtctcccctggaaagagttcgtcatatcgccttatatctgttatgttggggtgaagctaatcaagtcagattcactgctgaatgtttatgttttatctacaagtgtgctcttgactacttggattcccctctttgccaacaacgccaagaacctatgccagaaggtgatttcttgaatagagtcattacgccaatttatcatttcatcagaaatcaagtttatgaaattgttgatggtcgttttgtcaagcgtgaaagagatcataacaaaattgtcggttatgatgatttaaaccaattgttctggtatccagaaggtattgcaaagattgttcttgaagatggaacaaaattgatagaactcccattggaagaacgttatttaagattaggcgatgtcgtctgggatgatgtattcttcaaaacatataaagagacccgtacttggttacatttggtcaccaacttcaaccgtatttgggttatgcatatctccattttttggatgtactttgcatataattcaccaacattttacactcataactatcaacaattggtcgacaaccaacctttggctgcttacaagtgggcatcttgcgcattaggtggtactgtcgcaagtttgattcaaattgtcgctactttgtgtgaatggtcattcgttccaagaaaatgggctggtgctcaacatctatctcgtagattctggtttttatgcatcatctttggtattaatttgggtcctattatttttgtttttgcttacgacaaagatacagtctactccactgctgcacacgttgttgctgctgttatgttctttgttgcggttgctaccatcatattcttctccattatgccattgggggggttgtttacgtcatatatgaaaaaatctacaaggcgttatgttgcatctcaaacattcactgctgcatttgcccctctacatgggttagatagatggatgtcctatttagtttgggttactgtttttgctgccaaatattcagaatcgtactactttttagttttatctttgagagatccaattagaattttgtccaccactgcaatgaggtgtacaggtgaatactggtggggtgcggtactttgtaaagtgcaacccaagattgtcttaggtttggttatcgctaccgacttcattcttttcttcttggatacctacttatggtacattattgtgaataccattttctctgttgggaaatctttctatttaggtatttctatcttaacaccatggagaaatatcttcacaagattgccaaaaagaatatactccaagattttggctactactgatatggaaattaaatacaaaccaaaggttttgatttctcaagtatggaatgccatcattatttcaatgtacagagaacatctcttagccatcgaccatgtacaaaaattactatatcatcaagttccatctgaaatcgaaggtaaaagaactttgagagctcctaccttctttgtttctcaagatgacaataattttgagactgaatttttccctagggattcagaggctgagcgtcgtatttctttctttgctcaatctttgtctactccaattcccgaaccacttccagttgataacatgccaacgttcacagtattgactcctcactacgcggaaagaattctgctgtcattaagagaaattattcgtgaagatgaccaattttctagagttactcttttagaatatctaaaacaattacatcccgttgaatgggaatgttttgttaaggatactaagattttggctgaagaaaccgctgcctatgaaggaaatgaaaatgaagctgaaaaggaagatgctttgaaatctcaaatcgatgatttgccattttattgtattggttttaaatctgctgctccagaatatacacttcgtacgagaatttgggcttctttgaggtcgcagactctatatcgtaccatttcagggttcatgaattattcaagagctatcaaattactgtatcgtgtggaaaatcctgaaattgttcaaatgtttggtggtaatgctgaaggcttagaaagagagctagaaaagatggcaagaagaaagtttaaatttttggtctctatgcagagattggctaaattcaaaccacatgaactggaaaatgctgagtttttgttgagagcttacccagacttacaaattgcctacttggatgaagagccacctttgactgaaggtgaggagccaagaatctattccgctttgattgatggacattgtgaaattctagataatggtcgtagacgtcccaagtttagagttcaattatctggtaacccaattcttggtgacggtaaatctgataaccaaaaccatgctttgattttttacagaggtgaatacattcaattaattgatgccaaccaagataactacttggaagaatgtctgaagattagatctgtattggctgaatttgaggaattgaacgttgaacaagttaatccatatgctcccggtttaaggtatgaggagcaaacaactaatcatcctgttgctattgttggtgccagagaatacattttctctgaaaactctggtgtgctgggtgatgtggccgctggtaaagaacaaacttttggtacattatttgcgcgtactttatctcaaattggtggtaaattgcattatggtcatccggatttcattaatgctacgtttatgaccactagaggtggtgtttccaaagcacaaaagggtttgcatttaaacgaagatatttatgctggtatgaatgctatgcttcgtggtggtcgtatcaagcattgtgagtattatcaatgtggtaaaggtagagatttgggtttcggtacaattctaaatttcactactaagattggtgctggtatgggtgaacaaatgttatctcgtgaatattattatctgggtacccaattaccagtggaccgtttcctaacattctattatgcccatcctggtttccatttgaacaacttgttcattcaattatctttgcaaatgtttatgttgactttggtgaatttatcttccttggcccatgaatctattatgtgtatttacgataggaacaaaccaaaaacagatgttttggttccaattgggtgttacaacttccaacctgcggttgattgggtgagacgttatacattgtctattttcattgttttctggattgccttcgttcctattgttgttcaagaactaattgaacgtggtctatggaaagccacccaaagatttttctgccacctattatcattatcccctatgttcgaagtgtttgcgggccaaatctactcttctgcgttattaagtgatttagcaattggtggtgctcgttatatatccaccggtcgtggttttgcaacttctcgtataccattttcaattttgtattcaagatttgcaggatctgctatctacatgggtgcaagatcaatgttaatgttgctgttcggtactgtcgcacattggcaagctccactactgtggttttgggcctctctatcttcattaatttttgcgcctttcgttttcaatccacatcagtttgcttgggaagatttctttttggattacagggattatatcagatggttatcaagaggtaataatcaatatcatagaaactcgtggattggttacgtgaggatgtctagggcacgtattactgggtttaaacgtaaactggttggcgatgaatctgagaaagctgctggtgacgcaagcagggctcatagaaccaatttgatcatggctgaaatcataccctgtgcaatttatgcagctggttgttttattgccttcacgtttattaatgctcaaaccggtgtcaagactactgatgatgatagggtgaattctgttttacgtatcatcatttgtaccttggcgccaatcgccgttaacctcggtgttctattcttctgtatgggtatgtcatgctgctctggtcccttatttggtatgtgttgtaagaagacaggttctgtaatggctggaattgcccacggtgttgctgttattgtccacattgcctttttcattgtcatgtgggttttggagagcttcaactttgttagaatgttaatcggagtcgttacttgtatccaatgtcaaagactcatttttcattgcatgacagcgttaatgttgactcgtgaatttaaaaacgatcatgccaatacagccttctggactggtaagtggtatggtaaaggtatgggttacatggcttggacccagccaagtagagaattaaccgccaaggtaattgagctttcagaatttgcagctgattttgttctaggtcatgtgattttaatctgtcaactgccactcattataatcccaaaaatagataaattccactcgattatgctattctggctaaagccctctcgtcaaattcgtcccccaatttactctctgaagcaaactcgtttgcgtaagcgtatggtcaagaagtactgctctttgtactttttagtattggctatttttgcaggatgcattattggtcctgctgtagcctctgctaagatccacaaacacattggagattcattggatggcgttgttcacaatctattccaaccaataaatacaaccaataatgacactggttcccaaatgtcaacttatcaaagtcactactatactcatacgccatcattaaagacctggtcaactataaaataa

SEQ ID NO: 102 - protein, 1876 aa, Saccharomyces cerevisiae
MNTDQQPYQGQTDYTQGPGNGQSQEQDYDQYGQPLYPSQADGYYDPNVAAGTEADMYGQQPPNESYDQDYTNGEYYGQPPNMAAQDGENFSDFSSYGPPGTPGYDSYGGQYTASQMSYGEPNSSGTSTPIYGNYDPNAIAMALPNEPYPAWTADSQSPVSIEQIEDIFIDLTNRLGFQRDSMRNMFDHFMVLLDSRSSRMSPDQALLSLHADYIGGDTANYKKWYFAAQLDMDDEIGFRNMSLGKLSRKARKAKKKNKKAMEEANPEDTEETLNKIEGDNSLEAADFRWKAKMNQLSPLERVRHIALYLLCWGEANQVRFTAECLCFIYKCALDYLDSPLCQQRQEPMPEGDFLNRVITPIYHFIRNQVYEIVDGRFVKRERDHNKIVGYDDLNQLFWYPEGIAKIVLEDGTKLIELPLEERYLRLGDVVWDDVFFKTYKETRTWLHLVTNFNRIWVMHISIFWMYFAYNSPTFYTHNYQQLVDNQPLAAYKWASCALGGTVASLIQIVATLCEWSFVPRKWAGAQHLSRRFWFLCIIFGINLGPIIFVFAYDKDTVYSTAAHVVAAVMFFVAVATIIFFSIMPLGGLFTSYMKKSTRRYVASQTFTAAFAPLHGLDRWMSYLVWVTVFAAKYSESYYFLVLSLRDPIRILSTTAMRCTGEYWWGAVLCKVQPKIVLGLVIATDFILFFLDTYLWYIIVNTIFSVGKSFYLGISILTPWRNIFTRLPKRIYSKILATTDMEIKYKPKVLISQVWNAIIISMYREHLLAIDHVQKLLYHQVPSEIEGKRTLRAPTFFVSQDDNNFETEFFPRDSEAERRISFFAQSLSTPIPEPLPVDNMPTFTVLTPHYAERILLSLREIIREDDQFSRVTLLEYLKQLHPVEWECFVKDTKILAEETAAYEGNENEAEKEDALKSQIDDLPFYCIGFKSAAPEYTLRTRIWASLRSQTLYRTISGFMNYSRAIKLLYRVENPEIVQMFGGNAEGLERELEKMARRKFKFLVSMQRLAKFKPHELENAEFLLRAYPDLQIAYLDEEPPLTEGEEPRIYSALIDGHCEILDNGRRRPKFRVQLSGNPILGDGKSDNQNHALIFYRGEYIQLIDANQDNYLEECLKIRSVLAEFEELNVEQVNPYAPGLRYEEQTTNHPVAIVGAREYIFSENSGVLGDVAAGKEQTFGTLFARTLSQIGGKLHYGHPDFINATFMTTRGGVSKAQKGLHLNEDIYAGMNAMLRGGRIKHCEYYQCGKGRDLGFGTILNFTTKIGAGMGEQMLSREYYYLGTQLPVDRFLTFYYAHPGFHLNNLFIQLSLQMFMLTLVNLSSLAHESIMCIYDRNKPKTDVLVPIGCYNFQPAVDWVRRYTLSIFIVFWIAFVPIVVQELIERGLWKATQRFFCHLLSLSPMFEVFAGQIYSSALLSDLAIGGARYISTGRGFATSRIPFSILYSRFAGSAIYMGARSMLMLLFGTVAHWQAPLLWFWASLSSLIFAPFVFNPHQFAWEDFFLDYRDYIRWLSRGNNQYHRNSWIGYVRMSRARITGFKRKLVGDESEKAAGDASRAHRTNLIMAEIIPCAIYAAGCFIAFTFINAQTGVKTTDDDRVNSVLRIIICTLAPIAVNLGVLFFCMGMSCCSGPLFGMCCKKTGSVMAGIAHGVAVIVHIAFFIVMWVLESFNFVRMLIGVVTCIQCQRLIFHCMTALMLTREFKNDHANTAFWTGKWYGKGMGYMAWTQPSRELTAKVIELSEFAADFVLGHVILICQLPLIIIPKIDKFHSIMLFWLKPSRQIRPPIYSLKQTRLRKRMVKKYCSLYFLVLAIFAGCIIGPAVASAKIHKHIGDSLDGVVHNLFQPINTTNNDTGSQMSTYQSHYYTHTPSLKTWSTIK

SEQ ID NO: 103 - DNA, 4614 bp, Saccharomyces cerevisiae
atgacaatgcctcatcgctatatgtttttggcagtctttacacttctggcactaactagtgtggcctcaggagccacagaggcgtgcttaccagcaggccagaggaaaagtgggatgaatataaatttttaccagtattcattgaaagattcctccacatattcgaatgcagcatatatggcttatggatatgcctcaaaaaccaaactaggttctgtcggaggacaaactgatatctcgattgattataatattccctgtgttagttcatcaggcacatttccttgtcctcaagaagattcctatggaaactggggatgcaaaggaatgggtgcttgttctaatagtcaaggaattgcatactggagtactgatttatttggtttctatactaccccaacaaacgtaaccctagaaatgacaggttattttttaccaccacagacgggttcttacacattcaagtttgctacagttgacgactctgcaattctatcagtaggtggtgcaaccgcgttcaactgttgtgctcaacagcaaccgccgatcacatcaacgaactttaccattgacggtatcaagccatggggtggaagtttgccacctaatatcgaaggaaccgtctatatgtacgctggctactattatccaatgaaggttgtttactcgaacgctgtttcttggggtacacttccaattagtgtgacacttccagatggtaccactgtaagtgatgacttcgaagggtacgtctattcctttgacgatgacctaagtcaatctaactgtactgtccctgacccttcaaattatgctgtcagtaccactacaactacaacggaaccatggaccggtactttcacttctacatctactgaaatgaccaccgtcaccggtaccaacggcgttccaactgacgaaaccgtcattgtcatcagaactccaacaactgctagcaccatcataactacaactgagccatggaacagcacttttacctctacttctaccgaattgaccacagtcactggcaccaatggtgtacgaactgacgaaaccatcattgtaatcagaacaccaacaacagccactactgccataactacaactgagccatggaacagcacttttacctctacttctaccgaattgaccacagtcaccggtaccaatggtttgccaactgatgagaccatcattgtcatcagaacaccaacaacagccactactgccatgactacaactcagccatggaacgacacttttacctctacttctaccgaattgaccacagtcaccggtaccaatggtttgccaactgatgagaccatcattgtcatcagaacaccaacaacagccactactgccatgactacaactcagccatggaacgacacttttacctctacttctaccgaattgaccacagtcaccggtaccaatggtttgccaactgatgagaccatcattgtcatcagaacaccaacaacagccactactgccatgactacaactcagccatggaacgacacttttacctctacatccactgaaatcaccaccgtcaccggtaccaatggtttgccaactgatgagaccatcattgtcatcagaacaccaacaacagccactactgccatgactacacctcagccatggaacgacacttttacctctacatccactgaaatgaccaccgtcaccggtaccaacggtttgccaactgatgaaaccatcattgtcatcagaacaccaacaacagccactactgccataactacaactgagccatggaacagcacttttacctctacatccactgaaatgaccaccgtcaccggtaccaacggtttgccaactgatgaaaccatcattgtcatcagaacaccaacaacagccactactgccataactacaactcagccatggaacgacacttttacctctacatccactgaaatgaccaccgtcaccggtaccaacggtttgccaactgatgaaaccatcattgtcatcagaacaccaacaacagccactactgccatgactacaactcagccatggaacgacacttttacctctacatccactgaaatcaccaccgtcaccggtaccaccggtttgccaactgatgagaccatcattgtcatcagaacaccaacaacagccactactgccatgactacaactcagccatggaacgacacttttacctctacatccactgaaatgaccaccgtcaccggtaccaacggcgttccaactgacgaaaccgtcattgtcatcagaactccaactagtgaaggtctaatcagcaccaccactgaaccatggactggtactttcacctctacatccactgagatgaccaccgtcaccggtactaacggtcaaccaactgacgaaaccgtgattgttatcagaactccaaccagtgaaggtttggttacaaccaccactgaaccatggactggtacttttacttctacatctactgaaatgaccaccattactggaaccaacggcgttccaactgacgaaaccgtcattgtcatcagaactccaaccagtgaaggtctaatcagcaccaccactgaaccatggactggtacttttacttctacatctactgaaatgaccaccattactggaaccaatggtcaaccaactgacgaaaccgttattgttatcagaactccaactagtgaaggtctaatcagcactacaacggaaccatggaccggtactttcacttctacatctactgaaatgacgcacgtcaccggtaccaacggcgttccaactgacgaaaccgtcattgtcatcagaactccaaccagtgaaggtctaatcagcaccaccactgaaccatggactggcactttcacttcgacttccactgaggttaccaccatcactggaaccaacggtcaaccaactgacgaaactgtgattgttatcagaactccaaccagtgaaggtctaatcagcaccaccactgaaccatggactggtactttcacttctacatctactgaaatgaccaccgtcaccggtactaacggtcaaccaactgacgaaaccgtgattgttatcagaactccaaccagtgaaggtttggttacaaccaccactgaaccatggactggtacttttacttcgacttccactgaaatgtctactgtcactggaaccaatggcttgccaactgatgaaactgtcattgttgtcaaaactccaactactgccatctcatccagtttgtcatcatcatcttcaggacaaatcaccagctctatcacgtcttcgcgtccaattattaccccattctatcctagcaatggaacttctgtgatttcttcctcagtaatttcttcctcagtcacttcttctctattcacttcttctccagtcatttcttcctcagtcatttcttcttctacaacaacctccacttctatattttctgaatcatctaaatcatccgtcattccaaccagtagttccacctctggttcttctgagagcgaaacgagttcagctggttctgtctcttcttcctcttttatctcttctgaatcatcaaaatctcctacatattcttcttcatcattaccacttgttaccagtgcgacaacaagccaggaaactgcttcttcattaccacctgctaccactacaaaaacgagcgaacaaaccactttggttaccgtgacatcctgcgagtctcatgtgtgcactgaatccatctcccctgcgattgtttccacagctactgttactgttagcggcgtcacaacagagtataccacatggtgccctatttctactacagagacaacaaagcaaaccaaagggacaacagagcaaaccacagaaacaacaaaacaaaccacggtagttacaatttcttcttgtgaatctgacgtatgctctaagactgcttctccagccattgtatctacaagcactgctactattaacggcgttactacagaatacacaacatggtgtcctatttccaccacagaatcgaggcaacaaacaacgctagttactgttacttcctgcgaatctggtgtgtgttccgaaactgcttcacctgccattgtttcgacggccacggctactgtgaatgatgttgttacggtctatcctacatggaggccacagactgcgaatgaagagtctgtcagctctaaaatgaacagtgctaccggtgagacaacaaccaatactttagctgctgaaacgactaccaatactgtagctgctgagacgattaccaatactggagctgctgagacgaaaacagtagtcacctcttcgctttcaagatctaatcacgctgaaacacagacggcttccgcgaccgatgtgattggtcacagcagtagtgttgtttctgtatccgaaactggcaacaccaagagtctaacaagttccgggttgagtactatgtcgcaacagcctcgtagcacaccagcaagcagcatggtaggatatagtacagcttctttagaaatttcaacgtatgctggcagtgccaacagcttactggccggtagtggtttaagtgtcttcattgcgtccttattgctggcaattatttaa

SEQ ID NO: 104 - protein, 1537 aa, Saccharomyces cerevisiae
MTMPHRYMFLAVFTLLALTSVASGATEACLPAGQRKSGMNINFYQYSLKDSSTYSNAAYMAYGYASKTKLGSVGGQTDISIDYNIPCVSSSGTFPCPQEDSYGNWGCKGMGACSNSQGIAYWSTDLFGFYTTPTNVTLEMTGYFLPPQTGSYTFKFATVDDSAILSVGGATAFNCCAQQQPPITSTNFTIDGIKPWGGSLPPNIEGTVYMYAGYYYPMKVVYSNAVSWGTLPISVTLPDGTTVSDDFEGYVYSFDDDLSQSNCTVPDPSNYAVSTTTTTTEPWTGTFTSTSTEMTTVTGTNGVPTDETVIVIRTPTTASTIITTTEPWNSTFTSTSTELTTVTGTNGVRTDETIIVIRTPTTATTAITTTEPWNSTFTSTSTELTTVTGTNGLPTDETIIVIRTPTTATTAMTTTQPWNDTFTSTSTELTTVTGTNGLPTDETIIVIRTPTTATTAMTTTQPWNDTFTSTSTELTTVTGTNGLPTDETIIVIRTPTTATTAMTTTQPWNDTFTSTSTEITTVTGTNGLPTDETIIVIRTPTTATTAMTTPQPWNDTFTSTSTEMTTVTGTNGLPTDETIIVIRTPTTATTAITTTEPWNSTFTSTSTEMTTVTGTNGLPTDETIIVIRTPTTATTAITTTQPWNDTFTSTSTEMTTVTGTNGLPTDETIIVIRTPTTATTAMTTTQPWNDTFTSTSTEITTVTGTTGLPTDETIIVIRTPTTATTAMTTTQPWNDTFTSTSTEMTTVTGTNGVPTDETVIVIRTPTSEGLISTTTEPWTGTFTSTSTEMTTVTGTNGQPTDETVIVIRTPTSEGLVTTTTEPWTGTFTSTSTEMTTITGTNGVPTDETVIVIRTPTSEGLISTTTEPWTGTFTSTSTEMTTITGTNGQPTDETVIVIRTPTSEGLISTTTEPWTGTFTSTSTEMTHVTGTNGVPTDETVIVIRTPTSEGLISTTTEPWTGTFTSTSTEVTTITGTNGQPTDETVIVIRTPTSEGLISTTTEPWTGTFTSTSTEMTTVTGTNGQPTDETVIVIRTPTSEGLVTTTTEPWTGTFTSTSTEMSTVTGTNGLPTDETVIVVKTPTTAISSSLSSSSSGQITSSITSSRPIITPFYPSNGTSVISSSVISSSVTSSLFTSSPVISSSVISSSTTTSTSIFSESSKSSVIPTSSSTSGSSESETSSAGSVSSSSFISSESSKSPTYSSSSLPLVTSATTSQETASSLPPATTTKTSEQTTLVTVTSCESHVCTESISPAIVSTATVTVSGVTTEYTTWCPISTTETTKQTKGTTEQTTETTKQTTVVTISSCESDVCSKTASPAIVSTSTATINGVTTEYTTWCPISTTESRQQTTLVTVTSCESGVCSETASPAIVSTATATVNDVVTVYPTWRPQTANEESVSSKMNSATGETTTNTLAAETTTNTVAAETITNTGAAETKTVVTSSLSRSNHAETQTASATDVIGHSSSVVSVSETGNTKSLTSSGLSTMSQQPRSTPASSMVGYSTASLEISTYAGSANSLLAGSGLSVFIASLLLAII

SEQ ID NO: 105 - DNA, 3510 bp, Saccharomyces cerevisiae
atgcctgtggctgctcgatatatatttttgaccggcctatttttgctatctgtagctaatgttgctctaggtactacagaggcttgtttgccagctggagagaagaaaaatggtatgactataaacttttaccaatattccttaaaagattcatctacatactcaaatccgtcatatatggcctatggttatgctgatgcagaaaaactgggttctgtaagtgggcaaacaaagctttccatcgattattccatcccatgtaatggcgcatcagatacttgtgcttgttccgatgatgatgctactgaatatagcgcttcccaggttgtaccagtgaagcgtggcgttaaactttgttctgataatacaactctttcttctaaaactgagaaacgtgaaaatgacgattgcgatcaaggcgctgcctactggagttcagatctgttcggattctacacaacacccaccaacgtaaccgtggaaatgacaggttactttttaccaccaaaaactggtacctacacatttggcttcgctactgtggatgattcagcaattttatcggttggaggtaatgttgcctttgaatgttgtaaacaggaacagcctcctatcacatcaacggatttcactattaacggtattaaaccatggaacgcagatgcacctaccgacataaaggggtcaacgtacatgtacgccggttactattacccgatcaaaattgtttattcaaatgctgtatcctggggtacgcttcctgttagtgtggtattgccagatggtactgaggttaatgatgattttgaaggatatgttttttcttttgacgataatgctactcaagctcactgttccgttccaaaccctgctgagcatgcaagaacttgtgtatcatctgcaacatcttcctggtcgtccagtgaagtctgtacagagtgtaccgagaccgagtctaccagttatgtgacaccatatgtcactagctcttcctggtcgtccagtgaagtctgtacagagtgcaccgagaccgagtctactagcacctctactccatatgtcaccagctcttcctcgtcgtccagtgaagtctgtacggagtgcaccgaaactgagtctaccagttatgtgacaccatatgtcagctcgtctactgctgccgcaaactacactagctcattctcatcgtccagtgaagtctgtacagagtgcaccgaaactgagtctactagcacctctactccatatgtcactagctcttcctggtcgtccagtgaagtctgtacagagtgcaccgagaccgagtctaccagttatgtgacaccatatgtcagctcgtctactgctgccgcaaactacactagctcattctcatcgtccagtgaagtctgtacagagtgcaccgaaactgagtctactagcacctctactccatatgtcactagctcttcctcgtcgtccagtgaagtctgtacagagtgcaccgagaccgagtctaccagttatgtgacaccatatgtcagctcgtctactgctgccgcaaactacactagctctttctcatcgtccagtgaagtctgtacagagtgcaccgaaaccgagtctactagcacctctactccatatgtcaccagctcttcctggtcgtccagtgaagtctgtacagagtgcaccgagaccgagtctaccagttatgtgacaccatatgtcagctcgtctactgctgccgcaaactacactagctcattctcatcgtccagtgaagtctgtacagagtgcaccgaaaccgagtctacaagcacatccactccatatgcaacctcatctactggcacagctacttcatttaccgcttcaacttccaataccatgacgtctttggtccaaacagacacaaccgtttctttcagcctatcttcaactgtaagcgagcataccaacgctccaacttcatctgtagagtcaaatgctagtactttcatatcgtcaaataaaggcagcgttaaaagttatgttacgtcatccatacatagcattacgcccatgtatcctagtaaccaaaccgtaacatctagctctgttgtctccacaccaattacttccgaatcttctgaatcctcggcctcagttaccattctaccctcaactatcacttctgaattcaaaccatctacaatgaaaacgaaggtcgttagtatctcctcatcaccaactaatttgattaccagctatgacactacatctaaggattcaactgttggttcatccacatcgtctgtaagcctgatctctagtatttctctaccaagtagttattcagcttctagcgaacaaatatttcacagctccatcgttagttcaaacggtcaagcattaacaagtttttcttcgaccaaagtcagttcctcagaatcttctgaatcacatagaacatcgcccactacatccagtgaatcaggcatcaaatcttcaggcgttgaaatcgaatctacaagtacctcttctttcagctttcacgaaacttctacagcctccacctccgttcaaatatcttctcagtttgtgactccatcctcccctatttccacagttgcccctcgttctacagggctcaatagtcaaactgaaagtacaaattcttccaaggaaaccatgtcgtctgaaaatagcgccagcgttatgccttcttcatcagctacatctcccaaaacaggcaaagttaccagtgatgaaacttcttccggattttctcgtgatcgcaccactgtgtataggatgacttcagaaacaccctccacaaatgaacaaacaactttgattactgtaagttcttgtgaatcaaatagctgctcaaacacagtctcaagtgctgtagtttccacggccaccactaccatcaatgggattaccactgaatatactacatggtgccctctttctgctacggaattaacaacggtaagtaaattagagtcagaagaaaaaaccaccctaattacggttacttcttgtgagtctggtgtctgttccgaaactgcttcacctgctatcgtttcgacagccactgctaccgtcaatgatgtcgttacagtttattccacatggagcccacaggctacaaataaactagcggttagttctgacatcgaaaatagtgccagtaaggcttcattcgtttcagaggctgctgagacaaaatccataagcagaaacaacaattttgttccaacttctgggactacttctattgaaacacatacaaccactacaagcaacgcgtctgaaaatagcgacaatgtttctgcttctgaggctgtcagtagcaaaagtgtcacaaatcccgtgttgattagtgtatctcaacagcctcgtggcacaccagcaagtagtatgataggatctagtacagcctctttagagatgtcaagctacctcggcattgcaaatcatctactaaccaatagtggtattagtattttcattgcctccctattactggcaatcgtttaa

SEQ ID NO: 106 - protein, 1169 aa, Saccharomyces cerevisiae
MPVAARYIFLTGLFLLSVANVALGTTEACLPAGEKKNGMTINFYQYSLKDSSTYSNPSYMAYGYADAEKLGSVSGQTKLSIDYSIPCNGASDTCACSDDDATEYSASQVVPVKRGVKLCSDNTTLSSKTEKRENDDCDQGAAYWSSDLFGFYTTPTNVTVEMTGYFLPPKTGTYTFGFATVDDSAILSVGGNVAFECCKQEQPPITSTDFTINGIKPWNADAPTDIKGSTYMYAGYYYPIKIVYSNAVSWGTLPVSVVLPDGTEVNDDFEGYVFSFDDNATQAHCSVPNPAEHARTCVSSATSSWSSSEVCTECTETESTSYVTPYVTSSSWSSSEVCTECTETESTSTSTPYVTSSSSSSSEVCTECTETESTSYVTPYVSSSTAAANYTSSFSSSSEVCTECTETESTSTSTPYVTSSSWSSSEVCTECTETESTSYVTPYVSSSTAAANYTSSFSSSSEVCTECTETESTSTSTPYVTSSSSSSSEVCTECTETESTSYVTPYVSSSTAAANYTSSFSSSSEVCTECTETESTSTSTPYVTSSSWSSSEVCTECTETESTSYVTPYVSSSTAAANYTSSFSSSSEVCTECTETESTSTSTPYATSSTGTATSFTASTSNTMTSLVQTDTTVSFSLSSTVSEHTNAPTSSVESNASTFISSNKGSVKSYVTSSIHSITPMYPSNQTVTSSSVVSTPITSESSESSASVTILPSTITSEFKPSTMKTKVVSISSSPTNLITSYDTTSKDSTVGSSTSSVSLISSISLPSSYSASSEQIFHSSIVSSNGQALTSFSSTKVSSSESSESHRTSPTTSSESGIKSSGVEIESTSTSSFSFHETSTASTSVQISSQFVTPSSPISTVAPRSTGLNSQTESTNSSKETMSSENSASVMPSSSATSPKTGKVTSDETSSGFSRDRTTVYRMTSETPSTNEQTTLITVSSCESNSCSNTVSSAVVSTATTTINGITTEYTTWCPLSATELTTVSKLESEEKTTLITVTSCESGVCSETASPAIVSTATATVNDVVTVYSTWSPQATNKLAVSSDIENSASKASFVSEAAETKSISRNNNFVPTSGTTSIETHTTTTSNASENSDNVSASEAVSSKSVTNPVLISVSQQPRGTPASSMIGSSTASLEMSSYLGIANHLLTNSGISIFIASLLLAIV

SEQ ID NO: 107 - DNA, 4104 bp, Saccharomyces cerevisiae
atgcaaagaccatttctactcgcttatttggtcctttcgcttctatttaactcggctttgggttttccaactgcactagttccaagaggatcctccgaaggaactagctgtaattctatcgttaatggctgtcccaacttagacttcaattggcacatggaccagcaaaatatcatgcagtatactttggatgtgacttccgtttcttgggttcaagacaacacataccaaatcactattcatgtcaaaggtaaagaaaatattgacctgaagtatctatggtctttgaaaatcattggtgtcactggtccaaaaggtaccgtccaactatacggttacaacgaaaatacctatttgattgacaacccaactgatttcacagccacttttgaagtttatgccacacaagatgtcaacagctgtcaggtgtggatgcctaacttccaaattcaattcgagtatttgcaaggtagtgccgctcaatatgcaagctcctggcaatggggaactacatcttttgatttgtctactggttgtaacaactatgacaatcaaggccactctcaaacggatttcccaggcttctattggaacatagattgtgacaataattgtggcggtacgaagtcatctaccactacatctagcacttccgagtcatctaccactacatctagcacttccgagtcatctaccactacatctagcacttccgagtcatctaccactacatctagcacttccgagtcatctacatcatcatcaaccaccgctcctgctacaccaaccactacctcatgcactaaggaaaagcctacacccccaaccactacctcatgcacaaaggaaaagcctacacctcctcatcacgacaccactccatgtacaaagaagaaaactaccacatctaagacatgcactaagaagactactactccagtaccaaccccatcaagctctactactgaaagttcttctgctccagtaccaactccatccagctctactactgaaagctcttctgctccagtaaccagctctaccactgaaagctcttctgctccagtaccaaccccatcaagctctactactgaaagctcttctgctccagtaaccagctctaccactgaaagctcttctgctccagtaaccagctctaccactgaaagctcttctgctccagtaccaactccatccagctctactactgaaagctcttctgctccagtaaccagctctaccactgaaagctcttctgctccagtaaccagctctaccactgaaagctcttctgctccagtaaccagctctaccactgaaagctcttctgctccagtaaccagctctaccactgaaagctcttctgctccagtaccaactccatccagctctactactgaaagctcttctgctccagtaaccagctctaccactgaaagctcttctgctccagtaccaactccatccagctctactactgaaagctcttctgctccagtaaccagctctaccactgaaagctcttctgctccagtaccaactccatccagctctactactgaaagctcttctgctccagctccaaccccatcaagctccaccactgaaagctcttctgctccagtaaccagctctaccactgaaagctcttctgctccagtaccaactccatccagctctactactgaaagctcttctactccagtaaccagctccaccactgaaagctcttctgctccagtgccaactccatcaagctctactactgaaagctcttctgctccagtaccaactccatcaagctctactactgaaagctcttctgctccagctccaaccccatcaagctctactactgaaagctcttctgctccagtaaccagctctaccactgaaagctcttctgctccagtaccaactccatccagctctactactgaaagctcttctgctccagtaccaaccccatccagctctactactgaaagctcttctgctccagtaccaactccatccagctctactactgaaagctcttctgctccagtaaccagctctaccactgaaagctcttctgctccagtaaccagctctaccactgaaagctcttctgctccagtaccaactccatccagctctactactgaaagctcttctgctccagtaccaactccatccagctctactactgaaagctcttctgctccagtaccaactccatccagctctactactgaaagctcttctgctccagtaaccagctctaccactgaaagctcttctgctccagtaccaactccatccagctctactactgaaagctcttctgctccagtgccaactccatccagctctactaccgaaagctcttctgctccagtaccaaccccatcaagctctactactgaaagctctgtagcaccagtaccaaccccatcttcctctagcaacatcacttcctccgctccatcttcaaccccattcagctctagcactgaaagctcttctgttccagtaccaaccccatcaagctctactactgaaagctcttctgctccagtatccagctccaccactgaaagctctgtagcaccagtaccaaccccatcttcctctagcaacatcacttcctccgctccatcttcaattccattcagctctactactgaaagcttttctactggcactactgtcactccatcatcatccaaataccctggcagtcaaacagaaacctctgtttcttctacaaccgaaactaccattgttccaactaaaactacgacttctgtcactacaccatcaacaaccactattaccactacggtttgctctacaggaacaaactctgccggtgaaactacctctggatgctctccaaagaccgttacaactactgttccaactacaactacgacttctgtcactacatcatcaacaaccactattactactacagtttgctctacaggaacaaactctgccggtgaaactacctctggatgctctccaaagaccattacaactactgttccatgttcaaccagtccaagcgaaaccgcctcggaatcaacaaccacttcacctaccacacctgtaactacagttgtctcaaccaccgtcgttactactgagtattctactagtacaaaaccaggtggtgaaattacaactacatttgtcaccaaaaacattccaaccacttacctaaccacaattgctccaactccatcagtcactacggttaccaatttcaccccaaccactattactactacggtttgctctacaggtacaaactctgccggtgaaactacctctggatgctctccaaagactgtcacaaccactgttccttgttcaactggtactggcgaatacactactgaagctaccacccttgttacaacagctgtcacaaccaccgttgttaccactgaatcctctacgggtactaactccgctggtaagacgacaactggttacacaacaaagtctgtaccaaccacctatgtaaccactttggctccaagtgcaccagtaactcctgccactaatgccgtaccaactacaataaccactactgaatgttctgctgctacaaacgctgccggtgaaactacatctgtatgctctgctaagactatcgtaagttctgcaagcgcaggcgaaaacactgcaccttcggctaccacccctgtcacgacggctattccaaccacagttattaccactgagtcatctgttggtactaactccgctggcgaaacaacaactggttacacaaccaagtccatcccaaccacttacataaccactttgattccaggttcaaatggtgccaagaattacgaaactgtggccacagcaaccaaccctatttcaatcaagactacatcccaactagctacaacagcttctgcttctagcgtggctcccgttgtcacatctccatctctaactggtccactacaatctgcttctggttctgcagtcgctacatactctgttccttctatctcgagtacttaccaaggtgctgctaatatcaaggttcttggaaactttatgtggttgctactcgctcttccagttgtattctaa

SEQ ID NO: 108 - protein, 1367 aa, Saccharomyces cerevisiae
MQRPFLLAYLVLSLLFNSALGFPTALVPRGSSEGTSCNSIVNGCPNLDFNWHMDQQNIMQYTLDVTSVSWVQDNTYQITIHVKGKENIDLKYLWSLKIIGVTGPKGTVQLYGYNENTYLIDNPTDFTATFEVYATQDVNSCQVWMPNFQIQFEYLQGSAAQYASSWQWGTTSFDLSTGCNNYDNQGHSQTDFPGFYWNIDCDNNCGGTKSSTTTSSTSESSTTTSSTSESSTTTSSTSESSTTTSSTSESSTSSSTTAPATPTTTSCTKEKPTPPTTTSCTKEKPTPPHHDTTPCTKKKTTTSKTCTKKTTTPVPTPSSSTTESSSAPVPTPSSSTTESSSAPVTSSTTESSSAPVPTPSSSTTESSSAPVTSSTTESSSAPVTSSTTESSSAPVPTPSSSTTESSSAPVTSSTTESSSAPVTSSTTESSSAPVTSSTTESSSAPVTSSTTESSSAPVPTPSSSTTESSSAPVTSSTTESSSAPVPTPSSSTTESSSAPVTSSTTESSSAPVPTPSSSTTESSSAPAPTPSSSTTESSSAPVTSSTTESSSAPVPTPSSSTTESSSTPVTSSTTESSSAPVPTPSSSTTESSSAPVPTPSSSTTESSSAPAPTPSSSTTESSSAPVTSSTTESSSAPVPTPSSSTTESSSAPVPTPSSSTTESSSAPVPTPSSSTTESSSAPVTSSTTESSSAPVTSSTTESSSAPVPTPSSSTTESSSAPVPTPSSSTTESSSAPVPTPSSSTTESSSAPVTSSTTESSSAPVPTPSSSTTESSSAPVPTPSSSTTESSSAPVPTPSSSTTESSVAPVPTPSSSSNITSSAPSSTPFSSSTESSSVPVPTPSSSTTESSSAPVSSSTTESSVAPVPTPSSSSNITSSAPSSIPFSSTTESFSTGTTVTPSSSKYPGSQTETSVSSTTETTIVPTKTTTSVTTPSTTTITTTVCSTGTNSAGETTSGCSPKTVTTTVPTTTTTSVTTSSTTTITTTVCSTGTNSAGETTSGCSPKTITTTVPCSTSPSETASESTTTSPTTPVTTVVSTTVVTTEYSTSTKPGGEITTTFVTKNIPTTYLTTIAPTPSVTTVTNFTPTTITTTVCSTGTNSAGETTSGCSPKTVTTTVPCSTGTGEYTTEATTLVTTAVTTTVVTTESSTGTNSAGKTTTGYTTKSVPTTYVTTLAPSAPVTPATNAVPTTITTTECSAATNAAGETTSVCSAKTIVSSASAGENTAPSATTPVTTAIPTTVITTESSVGTNSAGETTTGYTTKSIPTTYITTLIPGSNGAKNYETVATATNPISIKTTSQLATTASASSVAPVVTSPSLTGPLQSASGSAVATYSVPSISSTYQGAANIKVLGNFMWLLLALPVVF

SEQ ID NO: 109 - DNA, 3228 bp, Saccharomyces cerevisiae
atgacaattgcacaccactgcatatttttggtaatcttggcctttctggcactaattaatgtggcctcaggagccacagaggcgtgcttaccagcaggccagaggaaaagtgggatgaatataaatttttaccagtattcattgaaagattcctccacatattcgaatgcagcatatatggcttatggatatgcctcaaaaaccaaactaggttctgtcggaggacaaactgatatttcgattgattataatattccctgtgttagttcatcaggcacatttccttgtcctcaagaagattcctatggaaactggggatgcaaaggaatgggtgcttgttctaatagtcaaggaattgcatactggagtactgatttatttggtttctatactaccccaacaaacgtaaccctagaaatgacaggttattttttaccaccacagacgggttcttacacgttttcttttgcaacagtagatgattctgcaattttatcagtcggtggtagcattgcgttcgaatgttgtgcacaagaacaacctcccatcacgtcgactaacttcacaatcaatggtatcaagccatgggatggaagtctccctgacaatatcacagggactgtctacatgtatgcaggctactattatccgctgaaggttgtttactccaatgccgtttcctggggcacgcttccaattagcgtggaattgcctgatggtactactgttagtgataactttgaagggtacgtttactcttttgacgatgacctaagtcagtcaaattgtactatccctgatccttcaatacatactactagcactatcacaactaccaccgagccatggaccggtactttcacttctacatccactgagatgaccaccatcaccgatactaacggtcaattaactgatgaaactgtcattgtcatcagaactccaacaacagctagcaccatcacaactaccaccgagccatggaccggtactttcacctctacatccactgagatgactactgtcaccggtaccaacggtcaaccaactgacgaaactgttattgtcattagaactccaactagtgagggtttgattactacaactaccgaaccatggaccggtactttcacctctacatccactgagatgactactgtgaccggtaccaacggtcaaccaactgacgaaactgttattgtcattagaactccaactagtgagggtttgattactacaactaccgaaccatggaccggtactttcacctctacatccactgaggttaccaccatcactggtaccaacggtcaaccaactgacgaaaccgtgattgtcattagaactccaactagtgagggtttgattactacaactaccgaaccatggaccggtactttcacctctacatctactgagatgactactgtcaccggtaccaacggtcaaccaactgacgaaactgttattgttatcagaactccaaccagtgaaggtctaatcagcaccaccactgaaccatggactggtactttcacctctacatctactgaggttaccaccatcactggtaccaacggtcaaccaactgacgaaaccgtgattgtcattagaactccaactagtgagggtttgattactacaactaccgaaccatggaccggaactttcacctctacatccactgagatgactactgtgaccggtaccaacggtcaaccaactgacgaaactgttattgtcattagaactccaactagtgagggtttgattactagaactaccgaaccatggactggtactttcacttctacatctactgaggttaccaccatcaccggtaccaacggtcaaccaactgacgaaactgttattgtcatcagaactccaactactgccatctcatccagtttgtcatcttcttcaggacaaatcaccagctctatcacgtcttcgcgtccaattattaccccattctatcctagcaatggaacttctgtgatttcctcctcagtaatttcttcttcagtcacttcttctctagtcacctcttcttcattcatttcttcctctgtcatttcttcttctacaacaacctccacttctatattctctgaatcatctacatcatccgtcattccaaccagtagttccacctctggttcttctgagagcaaaacgagttcggctagttcttcctcttcttcctcttctatctcttctgaatcaccaaagtctcctacaaattcttcttcatcattaccacctgttaccagtgcgacaacaggccaggaaactgcttcttcattaccacctgctaccactacaaaaacgagcgaacaaaccactttggttaccgtgacatcctgcgaatctcatgtgtgtactgaatccatctcctctgctattgtttccacggccaccgttactgttagcggcgtcacaacagagtataccacgtggtgccctatttctaccacagagacaacaaagcaaaccaaggggacaacagagcaaaccaaggggacaacagagcaaaccacagaaacaacaaaacaaaccacagtagttacaatttcttcttgtgaatctgacatatgctctaagactgcttctccagccattgtgtctacaagcactgctactattaacggcgttaccacagaatacacaacatggtgtcctatttccaccacagaatcgaagcaacaaactacgctagttactgttacttcctgcgaatctggtgtgtgttccgaaactacttcacctgccattgtttcgacggccacggctactgtgaatgatgttgttacggtctatcctacatggagaccacagactacgaatgaacagtctgtcagctctaaaatgaacagtgctaccagtgagacaactaccaatactggggctgctgagacaaaaacagcagtcacctcttcactttcaagattcaatcacgctgaaacacagacagcttccgcgaccgatgtgattggtcacagcagtagtgttgtttctgtatccgaaactggcaacaccatgagtctaacaagttccgggttgagcactatgtcgcaacagcctcgtagcacaccagcaagtagcatggtaggatctagtacagcttctttagaaatttcaacgtatgctggcagtgccaacagcttactggccggtagtggtttaagtgtcttcattgcgtccttattgctggcaattatttaa

SEQ ID NO: 110 - protein, 1075 aa, Saccharomyces cerevisiae
MTIAHHCIFLVILAFLALINVASGATEACLPAGQRKSGMNINFYQYSLKDSSTYSNAAYMAYGYASKTKLGSVGGQTDISIDYNIPCVSSSGTFPCPQEDSYGNWGCKGMGACSNSQGIAYWSTDLFGFYTTPTNVTLEMTGYFLPPQTGSYTFSFATVDDSAILSVGGSIAFECCAQEQPPITSTNFTINGIKPWDGSLPDNITGTVYMYAGYYYPLKVVYSNAVSWGTLPISVELPDGTTVSDNFEGYVYSFDDDLSQSNCTIPDPSIHTTSTITTTTEPWTGTFTSTSTEMTTITDTNGQLTDETVIVIRTPTTASTITTTTEPWTGTFTSTSTEMTTVTGTNGQPTDETVIVIRTPTSEGLITTTTEPWTGTFTSTSTEMTTVTGTNGQPTDETVIVIRTPTSEGLITTTTEPWTGTFTSTSTEVTTITGTNGQPTDETVIVIRTPTSEGLITTTTEPWTGTFTSTSTEMTTVTGTNGQPTDETVIVIRTPTSEGLISTTTEPWTGTFTSTSTEVTTITGTNGQPTDETVIVIRTPTSEGLITTTTEPWTGTFTSTSTEMTTVTGTNGQPTDETVIVIRTPTSEGLITRTTEPWTGTFTSTSTEVTTITGTNGQPTDETVIVIRTPTTAISSSLSSSSGQITSSITSSRPIITPFYPSNGTSVISSSVISSSVTSSLVTSSSFISSSVISSSTTTSTSIFSESSTSSVIPTSSSTSGSSESKTSSASSSSSSSSISSESPKSPTNSSSSLPPVTSATTGQETASSLPPATTTKTSEQTTLVTVTSCESHVCTESISSAIVSTATVTVSGVTTEYTTWCPISTTETTKQTKGTTEQTKGTTEQTTETTKQTTVVTISSCESDICSKTASPAIVSTSTATINGVTTEYTTWCPISTTESKQQTTLVTVTSCESGVCSETTSPAIVSTATATVNDVVTVYPTWRPQTTNEQSVSSKMNSATSETTTNTGAAETKTAVTSSLSRFNHAETQTASATDVIGHSSSVVSVSETGNTMSLTSSGLSTMSQQPRSTPASSMVGSSTASLEISTYAGSANSLLAGSGLSVFIASLLLAII

SEQ ID NO: 111 - DNA, 1785 bp, Saccharomyces cerevisiae
atgcacttggctgctatgatgctaggaaatcctatggcacctgcggttcaaatgcgcaatgttaatatgaaccctataccaattcctatggttggtaaccctatcgttaataatttttccattccaccatacaataatgcaaaccccacgactggtgcaactgctgttgctcccacagcgccgccttccggcgattttacaaatgtagggccaacccagaatcggagtcaaaacgttactggctggccagtctataattatccaatgcaacccactacggaaaatccagtgggaaacccgtgtaacaataataccacaaataatacaactaataacaaatctccagtgaaccaacctaaaagtttaaaaactatgcattcaacagataaaccaaataatgtcccgacgtcaaaatctacaagaagtagatctgcaacctcaaaagcgaagggtaaagttaaagccggtctagtggctaagagacgaagaaaaaataataccgctacagtttccgcgggatcgacgaacgcttgttcgccaaatattaccacaccaggctcaacaacaagtgaacccgctatggtaggttcaagagtaaataagactccaagatcagatattgctactaacttccgcaatcaagcaataatatttggcgaggaagatatttattctaattccaaatctagcccatcgttggatggagcatcaccttccgctttagcttctaaacagcccacaaaggtaaggaaaaatacaaaaaaggcatccacctcagcttttccagtagagtctacgaataaactcggtggcaacagcgtggtgacaggtaaaaagcgcagtccccctaacactagagtgtcgaggaggaaatccactccttctgttattctgaatgctgatgccactaaggatgagaataatatgttaagaacattctcgaatactattgctccgaatattcattccgctccgcccactaaaactgcgaattctctcccttttccaggtataaatttgggaagtttcaacaagccggctgtatccagtccattatcttcagtgacagagagttgcttcgatccagaaagtggcaagattgccggaaagaatggacccaagcgagcagtaaactcaaaagtttcggcatcatccccattaagcatagcaacacctcggtctggtgacgctcagaagcaaagaagttctaaggtaccaggaaacgtggttataaagccgccacatgggttttcaaccaccaatttgaatattactttaaagaactctaaaataatcacttcacagaataatacagtatcccaagaattgccgaatgggggaaacatactggaggcgcaagtaggcaatgattcaagaagtagtaaaggcaatcgtaacacattatctactccagaggaaaaaaagccgagtagtaataatcaaggatatgattttgacgccctcaaaaattcaagttctttgttgtttcctaatcaagcttatgcttctaacaatagaacaccaaacgagaattcaaatgttgctgatgaaacctctgcatctacaaatagtggcgataatgataacacattaattcagccctcatccaatgtgggtacaactttgggtcctcagcaaaccagtactaatgaaaatcagaatgtacactctcagaacttgaagtttgggaatattggtatggttgaagaccaaggaccggattacgatctcaatttactggatacaaatgaaaatgatttcaattttattaattgggaaggctga

SEQ ID NO: 112 - protein, 594 aa, Saccharomyces cerevisiae
MHLAAMMLGNPMAPAVQMRNVNMNPIPIPMVGNPIVNNFSIPPYNNANPTTGATAVAPTAPPSGDFTNVGPTQNRSQNVTGWPVYNYPMQPTTENPVGNPCNNNTTNNTTNNKSPVNQPKSLKTMHSTDKPNNVPTSKSTRSRSATSKAKGKVKAGLVAKRRRKNNTATVSAGSTNACSPNITTPGSTTSEPAMVGSRVNKTPRSDIATNFRNQAIIFGEEDIYSNSKSSPSLDGASPSALASKQPTKVRKNTKKASTSAFPVESTNKLGGNSVVTGKKRSPPNTRVSRRKSTPSVILNADATKDENNMLRTFSNTIAPNIHSAPPTKTANSLPFPGINLGSFNKPAVSSPLSSVTESCFDPESGKIAGKNGPKRAVNSKVSASSPLSIATPRSGDAQKQRSSKVPGNVVIKPPHGFSTTNLNITLKNSKIITSQNNTVSQELPNGGNILEAQVGNDSRSSKGNRNTLSTPEEKKPSSNNQGYDFDALKNSSSLLFPNQAYASNNRTPNENSNVADETSASTNSGDNDNTLIQPSSNVGTTLGPQQTSTNENQNVHSQNLKFGNIGMVEDQGPDYDLNLLDTNENDFNFINWEG

SEQ ID NO: 113 - DNA, 3969 bp, Saccharomyces cerevisiae
atgtctctggcacattattgtttactactagccatcgtcacattgctgggattaactaatgttgtctctgcgactacagcggcatgcctgccagcaaactcaaggaagaatggtatgaatgtaaacttttaccagtattcattgagagattcctccacatattcgaatgcagcatatatggcttatggatatgcctcaaaaactaaactgggttctgtcggaggacaaactgatatctcgattgattataatattccttgtgttagttcatcaggcacatttccttgtcctcaagaagatttatatggtaattggggatgcaaaggaattggtgcttgttctaataatccaataattgcatactggagtactgatttatttggtttctatactaccccaacaaacgtaaccctagaaatgacaggttattttttaccaccacagacgggttcttacacattcaagtttgctacagttgacgactctgcaattctatcagtcggtggtagcattgcgttcgaatgttgtgcacaagaacaacctcccatcacgtcgactaacttcaccatcaatggtatcaagccatggaatggaagtccccctgataatattacagggactgtctacatgtatgctggtttctattatccaatgaagattgtttactcaaatgccgttgcctggggtacacttccaattagtgtgacactaccagatggcactaccgttagtgatgactttgaagggtacgtatatacttttgacaacaatctaagccagccaaactgtaccattccagacccttcaaattatactgtcagtactaccataactacaacggaaccatggaccggtactttcacttctacatctactgaaatgaccaccgtcaccggtaccaacggcgttccaactgacgaaaccgtcattgtcatcagaactccaacaactgctagcaccatcataactacaactgagccatggaacagcacttttacctctacttctaccgaattgaccacagtcactggcaccaatggtgtacgaactgacgaaaccatcattgtaatcagaacaccaacaacagccactactgccataactacaactgagccatggaacagcacttttacctctacttctaccgaattgaccacagtcaccggtaccaatggtttgccaactgatgagaccatcattgtcatcagaacaccaacaacagccactactgccatgactacaactcagccatggaacgacacttttacctctacttctaccgaattgaccacagtcaccggtaccaatggtttgccaactgatgagaccatcattgtcatcagaacaccaacaacagccactactgccatgactacaactcagccatggaacgacacttttacctctacttctaccgaattgaccacagtcaccggtaccaatggtttgccaactgatgagaccatcattgtcatcagaacaccaacaacagccactactgccatgactacaactcagccatggaacgacacttttacctctacatccactgaaatcaccaccgtcaccggtaccaatggtttgccaactgatgagaccatcattgtcatcagaacaccaacaacagccactactgccatgactacaactcagccatggaacgacacttttacctctacatccactgaaatgaccaccgtcaccggtaccaacggtttgccaactgatgaaaccatcattgtcatcagaacaccaacaacagccactactgccataactacaactgagccatggaacagcacttttacctctacatccactgaaatgaccaccgtcaccggtaccaacggtttgccaactgatgaaaccatcattgtcatcagaacaccaacaacagccactactgccataactacaactcagccatggaacgacacttttacctctacatccactgaaatgaccaccgtcaccggtaccaacggtttgccaactgatgaaaccatcattgtcatcagaacaccaacaacagccactactgccatgactacaactcagccatggaacgacacttttacctctacatccactgaaatcaccaccgtcaccggtaccaacggtttgccaactgatgagaccatcattgtcatcagaacaccaacaacagccactactgccatgactacaactcagccatggaacgacacttttacctctacatccactgaaatgaccaccgtcaccggtaccaacggcgttccaactgacgaaaccgtcattgtcatcagaactccaactagtgaaggtctaatcagcaccaccactgaaccatggactggtactttcacctctacatccactgagatgaccaccgtcaccggtactaacggtcaaccaactgacgaaaccgtgattgttatcagaactccaaccagtgaaggtttggttacaactacaaccgagccatggaccggtactttcacctctacatctactgagatgaccaccatcactggaaccaacggtcaaccaactgatgaaactgtcattattgtcaaaactccaactactgccatctcatccagtttgtcatcttcttcaggacaaatcaccagctttatcacgtctgcgcgtccaattattaccccattctatcctagcaatggaacttctgtgatttcctcctcagtaatttcttcctcagacacttcttctctagtcatttcttcctcagtcacttcttctctagtcacttcttctccagtcatttcttcttcattcatttcttcccctgtcatttcttctacaacaacctccgcttctatactctctgaatcatctaaatcatccgtcattccaaccagtagttccacctctggttcttctgagagcgaaacgggttcagctagttctgcctcttcttcctcttctatctcttctgaatcaccaaagtctacatattcgtcttcatcattaccacctgttaccagtgcaacaacaagtcaggaaattacttcttcattaccacctgttaccactacaaaaacgagcgaacaaaccactttggttaccgtgacatcctgcgaatctcatgtgtgcactgaatctatctcctctgcgattgtttccacggccaccgttactgttagcggtgccacaacagagtataccacatggtgccctatttctaccacagagataacaaagcaaactacggagacaacaaagcaaaccaaggggacaacagagcaaaccacagaaacaacaaaacaaaccacagtagttacaatttcttcttgtgaatctgacgtatgctctaagactgcttctccagccattgtatctacaagcactgctactattaatggcgttaccacagaatacacaacatggtgtcctatttccaccacagaatcgaagcaacaaactacgctagttactgttacttcctgcggatctggtgtgtgttccgaaactacttcacctgccattgtttcgacggccacggctactgtgaatgatgttgttacggtctattctacatggaggccacagactacgaatgaacagtctgtcagctctaaaatgaacagtgctaccagtgagacaacaaccaatactggagctgctgagacaactaccagtactggagctgctgagacgaaaacagtagtcacctcttcaatttcaagattcaatcatgctgaaacacagacggcttccgcgaccgatgtgattggtcacagcagtagtgttgtttctgtatccgaaactggcaacaccaagagtctaacaagttccgggttgagtactatgtcgcaacagcctcgtagcacaccagcaagtagcatggtaggatctagtacagcttctttagaaatttcaacgtatgctggcagtgccaacagcttactggccggtagtggtttaagtgtcttcattgcgtccttattgctggcaattatttaa

SEQ ID NO: 114 - protein, 1322 aa, Saccharomyces cerevisiae
MSLAHYCLLLAIVTLLGLTNVVSATTAACLPANSRKNGMNVNFYQYSLRDSSTYSNAAYMAYGYASKTKLGSVGGQTDISIDYNIPCVSSSGTFPCPQEDLYGNWGCKGIGACSNNPIIAYWSTDLFGFYTTPTNVTLEMTGYFLPPQTGSYTFKFATVDDSAILSVGGSIAFECCAQEQPPITSTNFTINGIKPWNGSPPDNITGTVYMYAGFYYPMKIVYSNAVAWGTLPISVTLPDGTTVSDDFEGYVYTFDNNLSQPNCTIPDPSNYTVSTTITTTEPWTGTFTSTSTEMTTVTGTNGVPTDETVIVIRTPTTASTIITTTEPWNSTFTSTSTELTTVTGTNGVRTDETIIVIRTPTTATTAITTTEPWNSTFTSTSTELTTVTGTNGLPTDETIIVIRTPTTATTAMTTTQPWNDTFTSTSTELTTVTGTNGLPTDETIIVIRTPTTATTAMTTTQPWNDTFTSTSTELTTVTGTNGLPTDETIIVIRTPTTATTAMTTTQPWNDTFTSTSTEITTVTGTNGLPTDETIIVIRTPTTATTAMTTTQPWNDTFTSTSTEMTTVTGTNGLPTDETIIVIRTPTTATTAITTTEPWNSTFTSTSTEMTTVTGTNGLPTDETIIVIRTPTTATTAITTTQPWNDTFTSTSTEMTTVTGTNGLPTDETIIVIRTPTTATTAMTTTQPWNDTFTSTSTEITTVTGTNGLPTDETIIVIRTPTTATTAMTTTQPWNDTFTSTSTEMTTVTGTNGVPTDETVIVIRTPTSEGLISTTTEPWTGTFTSTSTEMTTVTGTNGQPTDETVIVIRTPTSEGLVTTTTEPWTGTFTSTSTEMTTITGTNGQPTDETVIIVKTPTTAISSSLSSSSGQITSFITSARPIITPFYPSNGTSVISSSVISSSDTSSLVISSSVTSSLVTSSPVISSSFISSPVISSTTTSASILSESSKSSVIPTSSSTSGSSESETGSASSASSSSSISSESPKSTYSSSSLPPVTSATTSQEITSSLPPVTTTKTSEQTTLVTVTSCESHVCTESISSAIVSTATVTVSGATTEYTTWCPISTTEITKQTTETTKQTKGTTEQTTETTKQTTVVTISSCESDVCSKTASPAIVSTSTATINGVTTEYTTWCPISTTESKQQTTLVTVTSCGSGVCSETTSPAIVSTATATVNDVVTVYSTWRPQTTNEQSVSSKMNSATSETTTNTGAAETTTSTGAAETKTVVTSSISRFNHAETQTASATDVIGHSSSVVSVSETGNTKSLTSSGLSTMSQQPRSTPASSMVGSSTASLEISTYAGSANSLLAGSGLSVFIASLLLAII

SEQ ID NO: 115 - DNA, 1062 bp, Saccharomyces cerevisiae
atgccaaagagaattgtatacaatatatccagtgacttccagttgaagtcgttactgggagagggtgcatacggtgtggtatgttctgcaacgcataagcccacgggagaaatcgtggcaataaaaaagatcgaaccattcgataagcctttgttcgcattacgtacgctgcgtgaaataaagatcctgaagcacttcaagcacgaaaatatcataacaatcttcaacattcaacgccctgactcgttcgaaaacttcaatgaggtctacataattcaagagctaatgcagacagatttacaccgtgtaatctccacccagatgctgagtgacgatcatatacaatattttatataccaaaccttgagagcagtgaaagtgctgcatggttcgaacgtcatccatcgtgatttaaagccctccaaccttctcataaactccaactgtgacttgaaagtatgtgatttcggtttagcaagaatcattgacgagtcagccgcggacaattcagagcccacaggtcagcaaagcggcatgaccgagtatgtggccacacgttggtacagggcgccagaggtgatgttaacctctgccaaatactcaagggccatggacgtgtggtcctgcggatgtattctcgctgaacttttcttaagacggccaatcttccctggcagagattatcgccatcaactactactgatattcggtatcatcggtacacctcactcagataatgatttgcggtgtatagagtcacccagggctagagagtacataaagtcgcttcccatgtaccctgccgcgccactggagaagatgttccctcgagtcaacccgaaaggcatagatcttttacagcgtatgcttgtttttgaccctgcgaagaggattactgctaaggaggcactggagcatccgtatttgcaaacataccacgatccaaacgacgaacctgaaggcgaacccatcccacccagcttcttcgagtttgatcactacaaggaggcactaacgacgaaagacctcaagaaactcatttggaacgaaatatttagttag

SEQ ID NO: 116 - protein, 353 aa, Saccharomyces cerevisiae
MPKRIVYNISSDFQLKSLLGEGAYGVVCSATHKPTGEIVAIKKIEPFDKPLFALRTLREIKILKHFKHENIITIFNIQRPDSFENFNEVYIIQELMQTDLHRVISTQMLSDDHIQYFIYQTLRAVKVLHGSNVIHRDLKPSNLLINSNCDLKVCDFGLARIIDESAADNSEPTGQQSGMTEYVATRWYRAPEVMLTSAKYSRAMDVWSCGCILAELFLRRPIFPGRDYRHQLLLIFGIIGTPHSDNDLRCIESPRAREYIKSLPMYPAAPLEKMFPRVNPKGIDLLQRMLVFDPAKRITAKEALEHPYLQTYHDPNDEPEGEPIPPSFFEFDHYKEALTTKDLKKLIWNEIFS

SEQ ID NO: 117 - DNA, 4980 bp, Saccharomyces cerevisiae
atgtcattgagtcatctcactttagatcaatattatgaaatacagtgcaacgaacttgaagcgatacgttccatttatatggatgactttactgacttaactaaaagaaagtctagctgggataagcagccacagattatattcgaaattacgcttcgatctgttgacaaagagccggttgaatcttctataacattacattttgcgatgaccccaatgtatccttataccgctccagaaatagaattcaaaaatgtacaaaatgtaatggatagtcaattgcaaatgctgaaaagtgaatttaagaaaatccacaacacctcccgaggccaagagattatatttgaaattacatcttttactcaagaaaaactggacgaatttcaaaatgtggtaaatacacagtccttggaagatgatcgattacaaagaatcaaagaaactaaagaacaattagaaaaggaagaaagagaaaaacaacaggaaacaataaaaaaaagatcagatgagcagcgaaggatagatgaaattgttcaaagagagttggagaaaagacaagatgatgatgatgatttgctattcaacagaacaacccagttagatttacaaccaccttcagaatgggttgcatcaggtgaagctattgtcttttcaaaaactataaaggcaaaattgcctaataactcaatgttcaagtttaaagcagttgtaaatcctaagccaataaaactgacatcagatatatttagtttttccaaacaatttcttgtgaagccttatataccaccagaatctccgttggcagattttttaatgtcttctgaaatgatggaaaatttctactatttgctatctgaaattgaattggataatagctatttcaacacaagtaatggaaaaaaagaaatagcaaatttagagaaagagttagagacggtgttgaaagctaagcatgacaatgtgaatcgattgttcggttatacggtggagcgcatggggagaaataatgcaacgtttgtttggaaaataagactcttgacagagtactgtaactactatccattgggagatttgatacaatctgttggatttgttaacttagcaacagcgcgtatttggatgattagattgcttgaaggattggaggccatacacaaattgggaattgttcataaatgtatcaacttagaaaccgtgatcctggtgaaggatgcagattttggaagcactattcccaagttagttcactccacttatggctacactgttttgaatatgctatcgagatatccaaataaaaatggttcttcggttgagttatctccaagtacatggatagcccctgagttgttgaaattcaataacgccaaacctcaaagattaactgatatttggcaacttggtgttttgtttatccagataatcagtggatctgatatagtgatgaattttgaaacgcctcaagaattcctagattcaacaagtatggatgaaactttatatgatcttctttcgaaaatgcttaataacgatccgaagaaaagattaggaacattagaactactgcccatgaaattcttaaggaccaatattgactctacaatcaatcgatttaacttagtttccgaaagtgtcaattctaattccttggagttaactcctggagataccataaccgttcggggcaatggaggtagaacactttcacaatcgagtatacgaagaagatcatttaatgttggttccagattctcttctataaatcctgcaacgcgatcacgatatgcttctgactttgaagagattgcagttttaggccagggcgcatttggacaagttgtcaaggcacgtaatgctctcgatagcagatactatgcgatcaagaagattagacatacagaagaaaagttatctactatattgagtgaagtaatgctgttagcaagcttaaatcatcaatatgttgtgcgttactatgctgcatggttagaagaagacagtatggatgaaaacgtttttgaatcaactgatgaagaaagtgacttgagcgaatcttcctctgattttgaggaaaatgatttattagatcaaagcagtatttttaaaaatagaacaaatcacgatttggataatagtaactgggatttcatatcggggtcaggatatccggatattgtctttgaaaatagttctcgtgatgatgaaaatgaagatctagaccatgatacttcctcgacttcctcgagcgaaagtcaagatgatactgataaagaatcaaagagtatccagaacgttccaagaaggaggaattttgtaaaaccgatgactgctgttaagaagaaaagtacgctttttattcaaatggagtactgtgaaaatagaacgctatatgatttgatccattctgaaaatttaaatcaacaacgtgatgaatattggaggttatttcgacaaattttggaagcactgagttatatacattcccagggtatcattcatagggatctgaagccaatgaatatttttatagatgaatcgagaaatgttaaaatcggtgattttgggttagctaagaacgtccatagatctctggatatacttaagctagattcacagaatttgccaggcagctcagataatttaacatccgccattggtacagcaatgtatgttgctactgaagttttagatggtacaggtcactataatgaaaagattgatatgtattcacttggaatcattttttttgaaatgatctatcctttcagtacaggtatggagagagttaatattttgaaaaagttacgatcagtgtcgatagaatttcctcctgatttcgacgataataagatgaaagttgaaaagaaaattataaggttactcatagaccatgatcccaataaaaggcctggtgctaggacattattaaatagtggttggcttcctgtgaagcatcaggatgaagtaatcaaagaggctttaaaaagtttgtcgaatccttcatccccttggcaacagcaagttcgagaaagtttatttaaccaatcttacagtctaacaaatgatattctatttgataactcagttccaacatccactcctttcgcaaacattctcaggtcccaaatgacagaagaggtagttaaaattttcaggaaacatggaggaattgaaaataatgctcctccgaggatttttccaaaggcccccatatacggtacgcagaatgtatatgaagtgcttgacaagggcggtaccgtcttgcagttacaatatgatttaacttatcctatggctaggtatctatctaaaaatccaagtctgatttctaagcaatataggatgcagcacgtttaccgacctcctgatcattcaaggtcaagtttggaacctagaaagtttggtgagattgacttcgacataatttcaaaatcttcctcagagtcaggattttatgatgcagaaagcttgaaaattatcgatgaaatattaaccgtatttcctgtatttgagaaaacaaacacttttttcatattaaatcatgctgatattttggagagtgttttcaactttacaaatattgataaagcccaaaggcctctagtttcacgaatgttgtcgcaagtaggctttgcaaggtccttcaaggaagtaaagaatgaactaaaggcgcaactgaacatatcttctacggcattgaatgatttggagttatttgattttagactggacttcgaagcagccaaaaaacgcctgtataaattgatgattgatagtccgcatctaaaaaaaattgaggactctttgtcccatatatcaaaggttctcagttacctaaaacccttagaagttgcaagaaatgttgtgatatctcctttgagtaactacaatagcgctttttacaaaggaggtatcatgtttcatgcagtttatgacgatggatcctcacgtaatatgatagctgctggagggaggtatgacactttgatatccttttttgccagaccatcaggaaaaaagagcagcaatactcgtaaggctgtaggtttcaacttagcgtgggaaacaatattcggtatagcccaaaactatttcaaactcgcttctggaaataggataaagaagagaaataggtttttgaaagatacagctgttgattggaagccaagcaggtgtgatgtattgatatcgagtttttcgaactctttgttggacacaatcggggttacaatactgaatacattgtggaagcaaaacattaaagcggatatgttaagggattgttcctcggtggatgatgtcgttactggcgctcaacaggatggtatagactggattttgctgattaagcaacaagcgtatccactaaccaatcacaagagaaagtacaagccattaaaaataaaaaaattgagcactaatgttgacatagatttagatcttgatgagtttttaaccttgtaccaacaagaaactggtaataaatctttgatcaacgatagtctcactttgggcgataaggctgatgaatttaaaagatgggatgaaaacagcagtgccggtagtagtcaagaaggtgacatagatgatgttgttgctggttcgactaataatcaaaaggtaatttatgttccaaacatggctacaagatctaagaaagctaataaaagggaaaagtgggtttatgaggatgcagccagaaattcttcgaatatgatattacacaatttatccaatgcaccaattatcactgttgatgccttaagagatgaaactttagaaataatctcaattacttctttggctcagaaggaagaatggctgagaaaagtttttgggtcaggtaataactcgactcctagaagctttgccacgagcatttataataacctctccaaagaggctcataaagggaataggtgggcaatattatactgccacaaaaccggaaaatcatctgttatcgatttacagaggtag

SEQ ID NO: 118 - protein, 1659 aa, Saccharomyces cerevisiae [sequence omitted]

SEQ ID NO: 119 - DNA, 846 bp, Saccharomyces cerevisiae
atgtccgaatatcagccaagtttatttgctttaaatccaatgggtttctcaccattggatggttctaaatcaaccaacgaaaatgtatctgcttccacttctactgccaaaccaatggttggccaattgatttttgataaattcatcaagactgaagaggatccaattatcaaacaggataccccttcgaaccttgattttgattttgctcttccacaaacggcaactgcacctgatgccaagaccgttttgccaattccggagctagatgacgctgtagtggaatctttcttttcgtcaagcactgattcaactccaatgtttgagtatgaaaacctagaagacaactctaaagaatggacatccttgtttgacaatgacattccagttaccactgacgatgtttcattggctgataaggcaattgaatccactgaagaagtttctctggtaccatccaatctggaagtctcgacaacttcattcttacccactcctgttctagaagatgctaaactgactcaaacaagaaaggttaagaaaccaaattcagtcgttaagaagtcacatcatgttggaaaggatgacgaatcgagactggatcatctaggtgttgttgcttacaaccgcaaacagcgttcgattccactttctccaattgtgcccgaatccagtgatcctgctgctctaaaacgtgctagaaacactgaagccgccaggcgttctcgtgcgagaaagttgcaaagaatgaaacaacttgaagacaaggttgaagaattgctttcgaaaaattatcacttggaaaatgaggttgccagattaaagaaattagttggcgaacgctga

SEQ ID NO: 120 - protein, 281 aa, Saccharomyces cerevisiae [sequence omitted]

SEQ ID NO: 121 - DNA, 2358 bp, Saccharomyces cerevisiae
atggtatgtaccagcacgagctcaaacttttattccattgcacaatatattttacaatcatacttcaaggtcaatgtagattctctaaactctctgaaattggtggatttgatagtggaccaaacttaccctgattctttgacgctgcgaaagctgaatgaaggagcaacgggacaaccatacgattatttcaatacagtttctcgtgatgctgatatctccaagtgtccaatttttgcgttgaccatattttttgttatacgatggagccacccaaaccctccaatttcaattgagaattttactacagtaccgttgctagattcaaactttatttctctaaattccaatcctttactatatattcaaaatcaaaacccaaacagcaattcaagtgttaaagtttcaaggtcacaaacgtttgaaccttctaaagagttgatcgatttggtatttccatggctgtcttatttgaagcaggatatgcttcttattgataggacgaattacaagctttattctctctgtgaactatttgaatttatgggcagggttgccattcaggatctccgatatctgagtcaacatcccttattactacccaatatcgtaacattcatttcaaaatttattcctgagttattccaaaacgaagagtttaaaggaatcggttcaattaaaaattcaaacaataatgccctgaacaatgttacaggaatagaaacccaatttttaaatccatctaccgaggaagtgagtcaaaaagttgattcttactttatggaattatcaaaaaaattaactacagaaaatatcaggttaagtcaagaaataacacaactaaaagcagatatgaactccgtaggcaatgtttgtaaccaaattttgctgttgcagagacaattgctttcaggaaatcaggcgatcggatcaaagtccgaaaatattgtgtcttccacaggtggggggatattaatactagataaaaatagcatcaattcgaacgtactgagtaatttggttcagtcgatagatcctaatcactccaagcccaacggacaagcccaaacacatcaaaggggtccgaaaggacaatcacatgcacaggttcaaagtactaatagccctgcgctagcgccaattaacatgttcccgagcttaagtaattctatacagccgatgcttggcaccttggctccgcaaccgcaagatatagtacagaagaggaagctaccgttaccaggttcaatagcctctgcagcaacaggcagtcctttttctccatcacccgttggtgagtctccctatagcaaacgctttaaactagacgataaaccaactccgtctcagacggctcttgattccttacttacaaaatccatttcaagccctagattacccctttcgacgttggctaacacagctgtcacggaatcttttcgctcacctcagcagtttcagcattctccagattttgtagttggtggtagctcaagttcaacaacggaaaataactctaagaaggtaaatgaagattctccatcatcttcttcaaaactagctgaacgacctcgtcttccaaacaacgactccactactagcatgcctgaaagtcccaccgaggtagctggtgatgatgttgatagggagaaaccgccagagtcaagtaagtcggagcccaatgataacagcccagaatcgaaagatcctgagaaaaatggtaaaaacagtaatccgcttggtacggatgctgacaaaccagtaccaatttctaatattcataattctactgaggctgcaaattcaagtggtacagtgacaaagacagctccatcatttccgcagagttcttctaagtttgaaattataaataaaaaggatacgaaggcggggccaaacgaggcaatcaaatacaagctgtccagagaaaataaaacaatatgggacctatatgcggagtggtatattggtctgaacggtaaatcttcaataaaaaaattgattgaaaattatggctggcgaaggtggaaggttagcgaagattcacatttttttcctactagaagaattattatggattatattgaaacggaatgtgatcgtggcataaaactcggcaggtttactaatcctcaacaaccgagggaggatatacggaagattttagtaggggacctagaaaagttcaggataaataacggtctgactctgaattctctatcattgtactttagaaatttaacgaaaaataacaaggaaatttgtatttttgaaaactttaaaaattggaacgttagatcaatgacagaagaagagaaattaaagtattgcaaaaggcgacataatacaccatcttaa

SEQ ID NO: 122 - protein, 785 aa, Saccharomyces cerevisiae
MVCTSTSSNFYSIAQYILQSYFKVNVDSLNSLKLVDLIVDQTYPDSLTLRKLNEGATGQPYDYFNTVSRDADISKCPIFALTIFFVIRWSHPNPPISIENFTTVPLLDSNFISLNSNPLLYIQNQNPNSNSSVKVSRSQTFEPSKELIDLVFPWLSYLKQDMLLIDRTNYKLYSLCELFEFMGRVAIQDLRYLSQHPLLLPNIVTFISKFIPELFQNEEFKGIGSIKNSNNNALNNVTGIETQFLNPSTEEVSQKVDSYFMELSKKLTTENIRLSQEITQLKADMNSVGNVCNQILLLQRQLLSGNQAIGSKSENIVSSTGGGILILDKNSINSNVLSNLVQSIDPNHSKPNGQAQTHQRGPKGQSHAQVQSTNSPALAPINMFPSLSNSIQPMLGTLAPQPQDIVQKRKLPLPGSIASAATGSPFSPSPVGESPYSKRFKLDDKPTPSQTALDSLLTKSISSPRLPLSTLANTAVTESFRSPQQFQHSPDFVVGGSSSSTTENNSKKVNEDSPSSSSKLAERPRLPNNDSTTSMPESPTEVAGDDVDREKPPESSKSEPNDNSPESKDPEKNGKNSNPLGTDADKPVPISNIHNSTEAANSSGTVTKTAPSFPQSSSKFEIINKKDTKAGPNEAIKYKLSRENKTIWDLYAEWYIGLNGKSSIKKLIENYGWRRWKVSEDSHFFPTRRIIMDYIETECDRGIKLGRFTNPQQPREDIRKILVGDLEKFRINNGLTLNSLSLYFRNLTKNNKEICIFENFKNWNVRSMTEEEKLKYCKRRHNTPS

SEQ ID NO: 123 - DNA, 1605 bp, Saccharomyces cerevisiae
atgcatcaccaaactaagttagatgtattcataatcagagcttataatttactgtctaacgagtctgtcattagtggtgcttccttgcagagtgttacaaactcgccacagacgacaacgaacacgccctcaggtatggttaacggggcggttggaacagggatagctaatccaacagggttgatggggtctgatagcacacctaacatcgatgagattataactagcactggtagtaatgctctgacgaaaaccaactcagatagcgctaatggtacgccgaatggtaattcaagttctacctcagccattagcaatgcaagcaatcctgccactactggtaataatgcgagctctagtgccacctcaaatggaatatatacgcaagcgcaatattctcaacttttcgccaaaatatcaaaactatataacgctacactatcatctgggtcaattgacgatagatcaacatcaccaaaatcggcaatcgaactatatcaaagatttcaacagatgattaaggaactagagctgagttttgacgcaagtccttacgcaaaatacttccgccggttggatggaaggctttggcaaataaagacagactcagaattagaaaacgatgaattgtggcgattagtctcaatgagcatatttacagtattcgatcctcagaccggccaaattctaactcaaggacgcaggaagggaaactccttaaatacatcaactaaaggctccccatcagatttacagggaataaacaacgggaacaataatgggaacaatggtaatattggaaatgggagtaatattaagaactatggaaataaaaacatgccaaacaaccgaacgaaaaaaagaggcaccagggtggctaaaaatgctaaaaatgggaaaaacaataaaaatagtaataaagagagaaacggcattacagatacgagtgcattcagtaatacaacaataagcaacccaggtaccaatatgctttttgatccatcattgtctcaacagttacaaaaacgactgcaaacgctatcacaagatgtcaattctcgttcgttgacaggatattatacacagccaaccagtcctggctcaggaggatttgaatttggtttgagtcatgcagatctgaaccccaatgcttccagtaataccatgggctataatacaatgtccaataatggatcccattcgtggaaacgaaggtcactgggatcgttagatgttaatacgctggatgacgaagcggtggaagaacttttgcaactgacaaatacgagtaagaggcagaggccgatgacaactgcagcagagggtgcgttaataaatgatggtccggacactaatttaaacgcgaataacacccaaatgaaagttgatttaaatccttcaaacagcatgggacctatagatacagaagccgtgatacgcccattgaaagaagcttatgacgcaatcatttctgaaaaaggccaaagaattgtgcaattagaaagagaattggaattacagcgccaagagacgcagtggttaaggaaaatgttaattgaagacatgggttgtgttagaagtatgttaagggatttacaaagatga

SEQ ID NO: 124 - protein, 534 aa, Saccharomyces cerevisiae
MHHQTKLDVFIIRAYNLLSNESVISGASLQSVTNSPQTTTNTPSGMVNGAVGTGIANPTGLMGSDSTPNIDEIITSTGSNALTKTNSDSANGTPNGNSSSTSAISNASNPATTGNNASSSATSNGIYTQAQYSQLFAKISKLYNATLSSGSIDDRSTSPKSAIELYQRFQQMIKELELSFDASPYAKYFRRLDGRLWQIKTDSELENDELWRLVSMSIFTVFDPQTGQILTQGRRKGNSLNTSTKGSPSDLQGINNGNNNGNNGNIGNGSNIKNYGNKNMPNNRTKKRGTRVAKNAKNGKNNKNSNKERNGITDTSAFSNTTISNPGTNMLFDPSLSQQLQKRLQTLSQDVNSRSLTGYYTQPTSPGSGGFEFGLSHADLNPNASSNTMGYNTMSNNGSHSWKRRSLGSLDVNTLDDEAVEELLQLTNTSKRQRPMTTAAEGALINDGPDTNLNANNTQMKVDLNPSNSMGPIDTEAVIRPLKEAYDAIISEKGQRIVQLERELELQRQETQWLRKMLIEDMGCVRSMLRDLQR

SEQ ID NO: 125 - DNA, 2193 bp, Saccharomyces cerevisiae
atgcaagacgaccccgaaaattcgaagctgtacgacctgctgaatagtcatctggacgtgcatggtcgaagtaatgaagagccgagacaaactggtgacagtaggagccagagtagtggcaacaccggtgaaaacgaggaggatatagcatttgccagtggattaaacggcggcacattcgactcaatgctggaggcactgcccgatgatttatattttacggacttcgtgtctccttttacagcagctgccacgaccagcgtgactactaagacggtcaaggacaccacaccagctaccaatcatatggatgatgatattgcgatgtttgattcacttgccacaactcagcccatcgacatagccgcatccaaccaacaaaatggtgaaattgcacaactttgggactttaacgtggaccaattcaacatgacgcccagcaactcgagcggttcagctactattagtgctcctaacagctttacttccgacataccgcaatacaaccacggttccctcggcaacagcgtctccaaatcctcactgttcccgtataattccagcacgtccaacagcaacatcaaccagccatctatcaataacaactcaaatactaatgcgcagtcccaccattccttcaacatctacaaactacaaaacaacaactcatcttcatccgctatgaacattaccaataataataatagcaacaatagtaatatccagcatccttttctgaagaagagcgattcgataggattatcttcatccaacacaacaaattctgtaagaaaaaactcacttatcaagccaatgtcgtccacgtccctggccaatttcaaaagagctgcctcagtatcttccagtatatccaatatggaaccatcaggacaaaataaaaaacctctgatacaatgtttcaattgtaaaactttcaagacaccgctttggaggagaagcccagaggggaatactctttgcaatgcctgcggtcttttccagaaattacatggtaccatgaggccattatccttaaaatcggacgttatcaaaaagaggatttcaaagaagagagccaaacaaacggacccaaacattgcacaaaatactccaagtgcacctgcaactgcctcaacttcagtaaccactacaaatgctaaacccatacgatcgaggaaaaaatcactacaacaaaactctttatctagagtgatacctgaagaaatcattagagacaacatcggtaatactaataatatccttaatgtaaataggggaggctataacttcaactcagtcccctccccggtcctcatgaacagccaatcgtataatagtagtaacgcaaattttaatggagcaagcaatgcaaatttgaattctaataacttaatgcgtcacaattcgaacactgttactcctaattttagaaggtcttcaagacgaagtagtacttcatcgaacacctcaagttccagtaaatcttcatccagatctgttgttccgatattaccaaaaccttcacctaatagcgctaattcacagcagttcaacatgaacatgaacctaatgaacacaacaaataatgtaagtgcaggaaatagtgtcgcatcctcaccaagaattatatcgtccgcaaactttaactcaaatagtcctctacagcagaatctattatcaaattctttccaacgtcaaggaatgaatataccaagaagaaagatgtcgcgcaatgcatcgtactcctcatcgtttatggctgcgtctttgcaacaactgcacgaacagcaacaagtggacgtgaattccaacacaaacacgaattcgaatagacagaattggaattcaagcaatagcgtttcaacaaattcaagatcatcaaattttgtctctcaaaagccaaattttgatatttttaatactcctgtagattcaccgagtgtctcaagaccttcttcaagaaaatcacatacctcattgttatcacaacaattgcagaactcggagtcgaattcgtttatctcaaatcacaaatttaacaatagattatcaagtgactctacttcacctataaaatatgaagcagatgtgagtgcaggcggaaagatcagtgaggataattccacaaaaggatcttctaaagaaagttcagcaattgctgacgaattggattggttaaaatttggtatatga

SEQ ID NO: 126 - protein, 730 aa, Saccharomyces cerevisiae
MQDDPENSKLYDLLNSHLDVHGRSNEEPRQTGDSRSQSSGNTGENEEDIAFASGLNGGTFDSMLEALPDDLYFTDFVSPFTAAATTSVTTKTVKDTTPATNHMDDDIAMFDSLATTQPIDIAASNQQNGEIAQLWDFNVDQFNMTPSNSSGSATISAPNSFTSDIPQYNHGSLGNSVSKSSLFPYNSSTSNSNINQPSINNNSNTNAQSHHSFNIYKLQNNNSSSSAMNITNNNNSNNSNIQHPFLKKSDSIGLSSSNTTNSVRKNSLIKPMSSTSLANFKRAASVSSSISNMEPSGQNKKPLIQCFNCKTFKTPLWRRSPEGNTLCNACGLFQKLHGTMRPLSLKSDVIKKRISKKRAKQTDPNIAQNTPSAPATASTSVTTTNAKPIRSRKKSLQQNSLSRVIPEEIIRDNIGNTNNILNVNRGGYNFNSVPSPVLMNSQSYNSSNANFNGASNANLNSNNLMRHNSNTVTPNFRRSSRRSSTSSNTSSSSKSSSRSVVPILPKPSPNSANSQQFNMNMNLMNTTNNVSAGNSVASSPRIISSANFNSNSPLQQNLLSNSFQRQGMNIPRRKMSRNASYSSSFMAASLQQLHEQQQVDVNSNTNTNSNRQNWNSSNSVSTNSRSSNFVSQKPNFDIFNTPVDSPSVSRPSSRKSHTSLLSQQLQNSESNSFISNHKFNNRLSSDSTSPIKYEADVSAGGKISEDNSTKGSSKESSAIADELDWLKFGI

SEQ ID NO: 127 - DNA, 1419 bp, Saccharomyces cerevisiae
atggggtgtacagtgagtacgcaaacaataggagacgaaagtgatccttttctacagaacaaaagagccaatgatgtcatcgagcaatcgttgcagctggagaaacaacgtgacaagaatgaaataaaactgttactattaggtgccggtgagtcaggtaaatcaacggttttaaaacaattaaaattattacatcaaggcggtttctcccatcaagaaaggttacagtatgctcaagtgatatgggcagatgccatacaatcaatgaaaattttgattattcaggccagaaaactaggtattcaacttgactgtgatgatccgatcaacaataaagatttgtttgcatgcaagagaatactgctaaaggctaaagctttagattatatcaacgccagtgttgccggtggttctgattttctaaatgattatgtactgaagtactcagaaaggtatgaaactaggaggcgtgttcagagtaccggacgagcaaaagctgctttcgatgaagacggaaatatttctaatgtcaaaagtgacactgacagagatgctgaaacggtgacgcaaaatgaggatgctgatagaaacaacagtagtagaattaacctacaggatatttgcaaggacttgaaccaagaaggcgatgaccagatgtttgttagaaaaacatcaagggaaattcaaggacaaaatagacgaaatcttattcacgaagacattgctaaggcaataaagcaactttggaataacgacaaaggtataaagcagtgttttgcacgttctaatgagtttcaattggagggctcagctgcatactactttgataacattgagaaatttgctagtccgaattatgtctgtacggatgaagacattttgaagggccgtataaagactacaggcattacagaaaccgaatttaacatcggctcgtccaaattcaaggttctcgacgctggtgggcagcgttctgaacgtaagaagtggattcattgtttcgaaggaattacagcagttttatttgttttagcaatgagtgaatacgaccagatgttgtttgaggatgaaagagtgaacagaatgcatgaatcaataatgctatttgacacgttattgaactctaagtggttcaaagatacaccgtttattttgtttttaaataaaattgatttgttcgaggaaaaggtaaaaagcatgcccataagaaagtactttcctgattaccagggacgtgtcggcgatgcagaagcgggtctaaaatattttgagaagatatttttgagcttgaataagacaaacaaaccaatctacgtgaaacgaacctgcgctaccgatacccaaactatgaagttcgtattgagtgcagtcaccgatctaatcatccagcaaaaccttaaaaaaattggtattatatga

SEQ ID NO: 128 - protein, 472 aa, Saccharomyces cerevisiae
MGCTVSTQTIGDESDPFLQNKRANDVIEQSLQLEKQRDKNEIKLLLLGAGESGKSTVLKQLKLLHQGGFSHQERLQYAQVIWADAIQSMKILIIQARKLGIQLDCDDPINNKDLFACKRILLKAKALDYINASVAGGSDFLNDYVLKYSERYETRRRVQSTGRAKAAFDEDGNISNVKSDTDRDAETVTQNEDADRNNSSRINLQDICKDLNQEGDDQMFVRKTSREIQGQNRRNLIHEDIAKAIKQLWNNDKGIKQCFARSNEFQLEGSAAYYFDNIEKFASPNYVCTDEDILKGRIKTTGITETEFNIGSSKFKVLDAGGQRSERKKWIHCFEGITAVLFVLAMSEYDQMLFEDERVNRMHESIMLFDTLLNSKWFKDTPFILFLNKIDLFEEKVKSMPIRKYFPDYQGRVGDAEAGLKYFEKIFLSLNKTNKPIYVKRTCATDTQTMKFVLSAVTDLIIQQNLKKIGII

SEQ ID NO: 129 - DNA, 1350 bp, Saccharomyces cerevisiae
atgggtctctgcgcatcttcagaaaagaacggcagcactcctgacacgcagaccgccagcgctggtagtgacaacgttggcaaagcgaaggtaccaccaaagcaggagccacagaagactgtgagaacagtcaacacagcaaatcaacaagaaaagcaacaacagaggcagcagcagccgtctccgcataatgttaaggaccgcaaggagcaaaacgggagcattaataacgcgatatctcccacggctacggcaaatacaagcggatcgcaacagatcaatatcgactctgccctgagagacaggtcgagtaacgttgcagcacaaccatcattgtcggacgcttcaagtggcagcaacgacaaagaactgaaagtgctactgctgggtgccggtgaaagtggtaagtccacggtattgcagcagttgaagattttacaccagaacgggtttagcgagcaggaaattaaagagtacatccccttgatctatcagaatctattggaaattggcaggaacctcatccaggcgagaacaaggtttaacgtcaacttggaaccggagtgtgaactgacgcaacaagacctgtcgagaaccatgtcctatgaaatgcccaataactacacgggccaattcccggaagatatcgcgggcgtaatatctacgttgtgggccttgccctcaacacaagatttagtcaatgggcctaacgcatcgaagttctatctaatggactcgactccttacttcatggaaaatttcaccaggatcacttcgcccaattacagacccacccagcaggacatattaagatcgagacagatgacgtcagggatttttgacaccgtcattgatatggggtcggatatcaagatgcatatttacgacgtgggtggacagcgttccgaaagaaaaaaatggatacactgcttcgacaatgtcactctggtcatattttgcgtttctctatcggagtacgaccagacgctgatggaggacaagaaccagaacaggtttcaggaatcgctggtgcttttcgataatattgtcaacagtagatggttcgcgcgcacgtctgtcgtactctttctgaataaaatcgacctttttgctgaaaaactaagcaaagtgcctatggaaaattacttcccagactacaccggcgggtcagacatcaacaaggctgctaagtacatactctggaggtttgttcagttaaacagggcgaatctaagcatatatcctcacgtgacacaggccacagacacgtcgaatataagattagtatttgccgccatcaaagaaacaattttggaaaatacattgaaagactctggagtgttacaatga

SEQ ID NO: 130 - protein, 449 aa, Saccharomyces cerevisiae
MGLCASSEKNGSTPDTQTASAGSDNVGKAKVPPKQEPQKTVRTVNTANQQEKQQQRQQQPSPHNVKDRKEQNGSINNAISPTATANTSGSQQINIDSALRDRSSNVAAQPSLSDASSGSNDKELKVLLLGAGESGKSTVLQQLKILHQNGFSEQEIKEYIPLIYQNLLEIGRNLIQARTRFNVNLEPECELTQQDLSRTMSYEMPNNYTGQFPEDIAGVISTLWALPSTQDLVNGPNASKFYLMDSTPYFMENFTRITSPNYRPTQQDILRSRQMTSGIFDTVIDMGSDIKMHIYDVGGQRSERKKWIHCFDNVTLVIFCVSLSEYDQTLMEDKNQNRFQESLVLFDNIVNSRWFARTSVVLFLNKIDLFAEKLSKVPMENYFPDYTGGSDINKAAKYILWRFVQLNRANLSIYPHVTQATDTSNIRLVFAAIKETILENTLKDSGVLQ

SEQ ID NO: 131 - DNA, 2886 bp, Saccharomyces cerevisiae
atgataactgagggatttcccccgaatttaaacgcgttgaaagggtcatccttactagaaaagagagttgattctctccgacagcttaacactaccacggttaaccagctgctggggttgccggggatgacctctacattcacggctccgcaactgttgcagttaagaataatagctataactgcgtctgccgtgtcccttattgccggttgcctcggaatgttcttcctttctaaaatggataagagacgaaaagtcttcagacatgatctcatcgcatttttgataatttgcgactttcttaaagcttttattctgatgatttatcccatgattatccttattaataatagtgtgtatgcaacacctgcattttttaataccttgggttggtttacggcctttgccatcgaaggtgcagacatggccataatgatattcgccatacattttgctattttgatcttcaagcctaattggaaatggcgaaataaaagatcgggaaatatggagggtggcttgtacaaaaaaaggtcatatatctggccaattactgcattagtacctgccattttagcaagcttagccttcattaattataataaactcaatgacgattctgacaccactattatactggataataataactacaactttcccgattctcccaggcaaggtggctacaaaccttggagtgcatggtgctatttaccacccaagccgtactggtataaaattgttttaagctggggtcccagatatttcattattattttcatatttgcagtctacctcagtatttatattttcattaccagtgaaagtaaaagaattaaagcgcaaattggagactttaaccataacgtactagaggaagagaaagaaaagaaaaaattatttgggctcggtcactggggaaaagccaaatggtatttcagatcctattttaaattgccattgctacatcttttgagaaatttaaagaattttttcaccatttcgttcatagatccgaatgaggaaacagacgattcaggtagtagtaatggaactttcaattttggtgagagttcgaatgagatacctacactattcagaaaaacaaatacaggtagtgatgagaatgtctcggcaagtggtggagttcgcttacttgactataacagtgctaaaccactcgatatgtccaaatatgcaatgtctgaacagccagatttggaaagaaataatccttttgattgtgaaaatgacatcacactcaatccttcggaactagtatccaagcaaaaggagcataaagttacttttagtgttgaaaatgaaggactggatacaagaaaaagttcaatgctgggacatcagactttctcttgccaaaattctctagaatctcctttagcaatgtatgataataagaacgataacagcgacataactagtaacattaaggaaaaaggaggcatcatcaacaacaacagtaacaacgacgacgacgacaacaacaacaataacgataacgataacgataacaataatagcaataataataataacaataataataataacaataataataataacaataataataacaataacaacaacaacaacaataataataataatagtaataatattaaaaataacgttgataacaataatactaatccagccgataatattcctacactttctaatgaagcatttactccgtctcaacaattttcacaggagagagtgaataataatgcagacagatgcgaaaattcaagtttcaccaacgtacaacagcatttccaagcccaaacctacaaacaaatgaaaaaacgtagggcacaaattcaaaagaatctaagggcaatattcatttatccactgtcgtatattgggatatggcttttccccatcattgcagatgcgttgcaatacaatcatgaaataaagcatgggcctaccatgtgggtgacatacattgacacttgcgttcgaccattaagttgtctcgtcgacgtcattgtttacctgttcaaggaaaaaccttggaactattcatgggcaaaaacagaatcaaaatatctcattgaaaaatatattctgaaaggagagcttggtgaaaaggaaattctgaagttttgtcacagcaattgggggaaaagaggttggtattatcgtggtaagtggaagaaaagaaaatgctggaaatattctacaaaccctctgaagcgtatactgtggtttgttgaacgcttctttaaacaattgtttgaactaaaactacactttagtttttatgacaattgtgacgattttgaatactgggaaaactactattcagccaaagattcaaacgataataaacgcacagaatctgatgagactaaaacgaatagtagcgatcgctcccttccatcaaattcacttgaactacaggcaatgcttaataacatcacggccgaagaggttgaagtgcccttgttttggaggatcattcatcatattccaatgcttggcggaatagatcttgatgagttaaacagattgttgaaaatacggtacaataacgaccatttttctctacccgggttgaaatttgcattaaaccaaaataaaagtcacgataaacatcaggacgtctcaactaacagtatggtcaaatccagcttcttttcaagcaatattgtcacaaacgatgatgagaatagcattgaagaggataagaatttacgctattcagatgctagtgcatctgaaaattatctggtcaagcccacaataccaggtacgactcctgatccaataattgaggcgcagaacgataatgatagtagtgatagtagcggcatagatttgatagccttcttaagaaatggaccattataa

SEQ ID NO: 132 - protein, 961 aa, Saccharomyces cerevisiae
MITEGFPPNLNALKGSSLLEKRVDSLRQLNTTTVNQLLGLPGMTSTFTAPQLLQLRIIAITASAVSLIAGCLGMFFLSKMDKRRKVFRHDLIAFLIICDFLKAFILMIYPMIILINNSVYATPAFFNTLGWFTAFAIEGADMAIMIFAIHFAILIFKPNWKWRNKRSGNMEGGLYKKRSYIWPITALVPAILASLAFINYNKLNDDSDTTIILDNNNYNFPDSPRQGGYKPWSAWCYLPPKPYWYKIVLSWGPRYFIIIFIFAVYLSIYIFITSESKRIKAQIGDFNHNVLEEEKEKKKLFGLGHWGKAKWYFRSYFKLPLLHLLRNLKNFFTISFIDPNEETDDSGSSNGTFNFGESSNEIPTLFRKTNTGSDENVSASGGVRLLDYNSAKPLDMSKYAMSEQPDLERNNPFDCENDITLNPSELVSKQKEHKVTFSVENEGLDTRKSSMLGHQTFSCQNSLESPLAMYDNKNDNSDITSNIKEKGGIINNNSNNDDDDNNNNNDNDNDNNNSNNNNNNNNNNNNNNNNNNNNNNNNNNNNNNSNNIKNNVDNNNTNPADNIPTLSNEAFTPSQQFSQERVNNNADRCENSSFTNVQQHFQAQTYKQMKKRRAQIQKNLRAIFIYPLSYIGIWLFPIIADALQYNHEIKHGPTMWVTYIDTCVRPLSCLVDVIVYLFKEKPWNYSWAKTESKYLIEKYILKGELGEKEILKFCHSNWGKRGWYYRGKWKKRKCWKYSTNPLKRILWFVERFFKQLFELKLHFSFYDNCDDFEYWENYYSAKDSNDNKRTESDETKTNSSDRSLPSNSLELQAMLNNITAEEVEVPLFWRIIHHIPMLGGIDLDELNRLLKIRYNNDHFSLPGLKFALNQNKSHDKHQDVSTNSMVKSSFFSSNIVTNDDENSIEEDKNLRYSDASASENYLVKPTIPGTTPDPIIEAQNDNDSSDSSGIDLIAFLRNGPL

SEQ ID NO: 133 - DNA, 3456 bp, Saccharomyces cerevisiae
atggatcaggataacaacaaccacaatgacagcaataggctgcacccacctgatatacatccaaatttgggccctcaattgtggctgaatagtagcggtgattttgacgacaacaacaacaacaacaacaacaacaacaataataatagcacaagaccacaaatgccatcacgaactagagaaacggcaacttcggaaagaaatgcaagtgaggttagggatgcaacgctaaataatatctttaggttcgatagtattcaacgggaaacgcttttgccaaccaacaacggacaaccgctaaatcaaaacttttcgctgacatttcaaccacaacagcaaacaaatgcgctgaacgggattgacataaacactgtgaacacaaaccttatgaatggtgtcaatgttcaaatagatcaacttaatcgattgttaccgaacctaccagaggaagaacggaagcaaatccacgaattcaagctaatagtgggcaaaaaaatccaagagtttctggttgttatagagaaacgtagaaaaaaaatactgaacgaaattgagctagacaaccttaaactaaaggagctacgtattgataactccccacaagcaattagttatttgcataaattacaaagaatgaggcttagggcgctagagacagaaaacatggaaattagaaatttaaggctaaaaatattaacaattatagaagagtacaaaaagtcattatatgcatactgccattccaagctaagaggtcaacaagtggaaaatccaacagataatttcatcatttggataaactccatagatactactgaatcatctgacttgaaagaagggctacaagatctttcgagatattcaaggcagttcataaataatgtgctttcgaatccatcaaatcaaaacatatgtacgagtgtcacccgaagatcacctgtgtttgccctaaacatgctaccctcggaaatattacacttaatattagataaacttaaccaaaaatatgatattgtaaaattccttaccgtttccaaactctgggctgaaataattgtgaagatactttattacagaccgcacatcaacaaaaagagtcaattagacttgtttttaaggactatgaagttaacttctgaagaaactgtattcaactatcgtttaatgatcaaaagattaaatttttcatttgttggtgactacatgcacgatacagagcttaactattttgtcggatgtaagaatttggagcgactaactttagtattttgcaagcatataaccagtgttccaatatcggctgttttgagaggatgtaaatttctccaaagtgtggatatcactggaataagagacgtttccgatgacgtatttgataccttagcgacatattgtcccagagtacagggcttttatgttcctcaggcaaggaatgtaacattcgattcactgcggaatttcatagtccattccccgatgttgaaaagaataaaaatcacagcaaacaataacatgaatgacgaattagtagaactattagccaacaaatgccctttgcttgtagaggtcgatataacattaagtccaaatgtcactgattctagtttgttaaaactcctcactaggttagttcagctgagggaattcagaataactcataatacgaatattacggataatcttttccaggagctttctaaagtagttgacgatatgccctctttaagattgattgatctttctggatgtgaaaatattacagataaaactatagaaagtatagtcaatttagcccctaaattacgtaatgtttttctaggcaagtgtagccgaattacagatgcatcgttgttccaattatcgaagctgggcaaaaacttgcaaacagtgcattttgggcactgtttcaatataactgataacggggtaagagcactctttcattcatgtacaagaatacagtatgtggactttgcgtgctgtacgaatttaaccaatagaactctttatgaactagcagacttaccaaaattaaagagaattggccttgtcaaatgtacgcaaatgactgacgagggtttgttgaatatggtttccttgcgaggccgaaatgatactttagaaagggtacatttatcttactgttctaatttaacaatatatccgatatatgagcttctaatgtcttgcccaaggctctcacatttgtctttgactgctgttccgtcatttttacgccccgatataacgatgtattgcaggcctgcaccctcagactttagtgaaaatcaacgtcaaatattctgcgtattttcagggaaaggtgttcataaacttcgccattatttagtaaatttaacgtcgcccgcttttggaccacatgtcgatgtaaatgatgttttgacaaaatatattagatccaagaatttgatatttaacggtgaaacacttgaagatgctcttaggagaatcataactgatttaaatcaagattccgctgcaattatagctgctacaggattaaatcaaatcaacggtctaaataacgattttcttttccagaatatcaattttgaacgaatagatgaagtattcagttggtatctcaatacttttgatggcattaggatgagctcggaggaagttaactcactattattgcaagtaaacaagacgttttgtgaagatccatttagtgatgtggacgatgatcaagattatgtcgtagcacctggtgtaaaccgggaaattaacagtgaaatgtgtcatattgttagaaaattccatgagttaaatgatcatattgatgatttcgaggtgaatgttgctagtttggtaagagttcagtttcagtttactggttttttacttcatgaaatgactcaaacctatatgcaaatgattgaattaaacagacaaatttgtttagtacaaaaaacggttcaggaatcgggcaacatagattaccaaaaagggcttttaatatggcgacttttattcattgacaaattcattatggtggttcagaagtacaagctctccaccgttgttttgagactatatttaaaagataacataacattgttaaccagacaaagagaactattaatagcccaccaaagatcagcatggaataacaataatgacaatgacgccaaccggaacgccaacaacatagtgaatattgtatcggatgctggggcaaacgatacaagtaacaatgaaactaacaatggtaatgatgacaatgaaacagaaaatccaaatttctggcgtcagtttggcaatagaatgcaaatatcacctgaccagatgaggaatctccaaatgggacttcgtaatcagaacatggttaggaacaataacaacaacacaattgacgaatcaatgcctgacactgccattgattctcaaatggatgaagcatcaggaacgcccgatgaagatatgttataa

SEQ ID NO: 134 - protein, 1151 aa, Saccharomyces cerevisiae
MDQDNNNHNDSNRLHPPDIHPNLGPQLWLNSSGDFDDNNNNNNNNNNNNSTRPQMPSRTRETATSERNASEVRDATLNNIFRFDSIQRETLLPTNNGQPLNQNFSLTFQPQQQTNALNGIDINTVNTNLMNGVNVQIDQLNRLLPNLPEEERKQIHEFKLIVGKKIQEFLVVIEKRRKKILNEIELDNLKLKELRIDNSPQAISYLHKLQRMRLRALETENMEIRNLRLKILTIIEEYKKSLYAYCHSKLRGQQVENPTDNFIIWINSIDTTESSDLKEGLQDLSRYSRQFINNVLSNPSNQNICTSVTRRSPVFALNMLPSEILHLILDKLNQKYDIVKFLTVSKLWAEIIVKILYYRPHINKKSQLDLFLRTMKLTSEETVFNYRLMIKRLNFSFVGDYMHDTELNYFVGCKNLERLTLVFCKHITSVPISAVLRGCKFLQSVDITGIRDVSDDVFDTLATYCPRVQGFYVPQARNVTFDSLRNFIVHSPMLKRIKITANNNMNDELVELLANKCPLLVEVDITLSPNVTDSSLLKLLTRLVQLREFRITHNTNITDNLFQELSKVVDDMPSLRLIDLSGCENITDKTIESIVNLAPKLRNVFLGKCSRITDASLFQLSKLGKNLQTVHFGHCFNITDNGVRALFHSCTRIQYVDFACCTNLTNRTLYELADLPKLKRIGLVKCTQMTDEGLLNMVSLRGRNDTLERVHLSYCSNLTIYPIYELLMSCPRLSHLSLTAVPSFLRPDITMYCRPAPSDFSENQRQIFCVFSGKGVHKLRHYLVNLTSPAFGPHVDVNDVLTKYIRSKNLIFNGETLEDALRRIITDLNQDSAAIIAATGLNQINGLNNDFLFQNINFERIDEVFSWYLNTFDGIRMSSEEVNSLLLQVNKTFCEDPFSDVDDDQDYVVAPGVNREINSEMCHIVRKFHELNDHIDDFEVNVASLVRVQFQFTGFLLHEMTQTYMQMIELNRQICLVQKTVQESGNIDYQKGLLIWRLLFIDKFIMVVQKYKLSTVVLRLYLKDNITLLTRQRELLIAHQRSAWNNNNDNDANRNANNIVNIVSDAGANDTSNNETNNGNDDNETENPNFWRQFGNRMQISPDQMRNLQMGLRNQNMVRNNNNNTIDESMPDTAIDSQMDEASGTPDEDML

SEQ ID NO: 135 - DNA, 5688 bp, Saccharomyces cerevisiae
atgtcctacaacgatccaaacttgaatggacagtattacagtaacggtgatgggactggtgacggtaattaccctacgtaccaagtgacacaggatcaaagtgcgtacgatgagtacggtcagccaatctatacacaaaaccaactggatgatggttattatgatccaaacgaacaatacgttgacggtacacaatttcctcagggacaagatccttcacaagaccaaggtccttataataacgatgctagttactataaccaaccccccaatatgatgaacccgtcttctcaagatggagagaacttctcagattttagcagctatggtcccccatccggcacttatcctaacgatcaatatactccttctcaaatgagttatcctgatcaagatggttcttcaggggcctcaaccccctatggaaatggtgtcgttaatggtaatggccagtactacgaccctaatgctattgaaatggctttaccaaatgatccatatcccgcatggaccgcagatccccagtctcccctgcccatcgaacaaatcgaagatatcttcatagatttaacaaataaattcggttttcagagagattccatgagaaatatgtttgaccattttatgacccttttggactctagatcttctaggatgtctccagaacaggcccttttatcattacatgcagactacataggtggagatacggccaactacaaaaaatggtactttgccgctcaacttgatatggatgatgaaattggtttcaggaatatgaagttgggtaagctatcaagaaaggcaagaaaggctaagaagaaaaataaaaaagccatgcaagaggctagtcctgaagacactgaggagactttaaatcaaattgagggtgataactcattagaagctgcggattttagatggaagtcaaagatgaatcaactttctccatttgaaatggttcgtcaaattgccttgtttttattatgttggggcgaggcaaatcaagtcagatttaccccggagtgtctttgtttcatttataaatgcgcctctgattacttagattctgcacaatgtcaacaacgtcctgatcccttgcctgaaggtgattttttgaatagagttattactcctctttatcgttttattaggagccaggtttacgaaatcgtggatggtcgatacgtgaagagtgaaaaagatcataacaaagttattgggtatgatgatgtcaatcaattattctggtatccagaaggtatagcaaaaattgtcatggaagatggaaccaggttgattgatttgccagcagaggagcgttatttgaaattgggagaaattccctgggatgatgtcttctttaaaacttacaaagaaacacgttcctggttacatttagttaccaacttcaatcgtatttggatcatgcacatctcagtatattggatgtattgtgcttacaatgctccaactttttatactcacaactatcaacaattggtcgacaatcagcctttggcagcttataaatgggccactgcagcattaggtggtactgtggcaagtttgattcaagttgccgctactttgtgcgagtggtcattcgttcctagaaaatgggcgggtgctcaacatttgtcccgtagattctggttcttgtgtgtcattatgggtattaatttggggcctgtgatatttgttttcgcttatgataaggacacagtatattctactgccgctcatgtcgttggagcagttatgttttttgttgctgtggcaacacttgttttcttttccgtaatgccattgggtggattatttacatcgtatatgaaaaagtccacaagaagttatgttgcctcacagaccttcaccgcatcttttgctccattgcatggtttagacaggtggatgtcttatttggtttgggtaaccgtttttgctgctaaatatgcagagtcatatttttttctaatactgtcactaagagatccaattaggattttatctactacatcaatgagatgtactggtgaatactggtggggtaataagatttgtaaggtccagccaaagattgttttaggtttaatgattgcgactgacttcattttgttctttttggatacctacttgtggtatatcgttgttaacactgttttctcggtcggaaaatcgttctatttgggtatttctatcttaactccatggagaaatattttcactagattgccaaaaagaatttattctaagatcttggctactactgatatggaaataaaatataaaccgaaagtactaatttctcagatttggaatgctatcattatctccatgtacagagaacatttattagccatagaccatgtacaaaaattgttatatcatcaggttccgtccgaaattgaaggtaagaggactttgagagcaccaactttctttgtttcccaagatgacaataattttgagactgaatttttccctagagattcagaagctgagcgccgtatttcattttttgcccaatctctatccactccaattccagaaccactaccagttgacaacatgccaacatttactgtattaactccccattacgccgagaggattctattatcattgagagaaattattcgtgaagatgatcaattttcaagagttactcttttggaatacctgaagcaattacacccggtagaatgggactgttttgttaaggatacgaaaattcttgctgaagaaacggccgcatatgaaaacaatgaagatgaacctgaaaaggaagacgctctgaaatctcaaattgatgatttacctttctattgtattggtttcaaatctgctgcaccagaatacaccttacgtacgagaatctgggcctctttaaggtcgcaaactttgtatcgcacaatctcggggtttatgaattattcgagggccataaaattactttatcgtgtggaaaatccagaaatcgttcaaatgttcggtggtaatgctgatggattagaaagagaactggaaaaaatggcaaggcgaaaattcaaattcttggtttcgatgcaaagattggccaagtttaaaccacatgaactagaaaatgctgagttcctgttgagagcttatccggacttgcaaattgcctacctggatgaagaacctcccttaaacgaaggcgaagagccaagaatttactcggccttaattgatggtcattgtgagattttagagaatggtcgtagacgtcccaaatttagagttcaactatccggtaatccaattcttggtgatggtaaatcagataatcaaaatcatgctttgattttttacagaggtgagtatattcaattgattgatgctaatcaagacaattacttggaagagtgtttgaaaatcaggtctgtcttagcagaatttgaagaattgggaattgagcaaattcatccttatactcctggtttaaaatatgaggaccaatccacaaatcatcctgttgcaattgtcggcgctagagaatatattttctcagaaaactctggtgttcttggtgatgtagcggctggtaaagaacaaacttttggtacattatttgcccgtactttggcacagattggtggtaaattgcattatggtcatccagattttattaatgcgacattcatgactactaggggtggtgtttccaaagcacaaaagggtctacatttaaatgaagatatttatgccggtatgaatgccgtacttcggggtggtcgtatcaagcattgcgaatattatcagtgtggtaaaggtagagatttaggttttggtacaattttgaatttcactactaagatcggtgctggtatgggtgaacaaatgttatctcgtgaatactattatttgggtacgcaattacctattgaccgttttttaacattttattatgcgcatccagggtttcacttgaataacttatttattcaattgtctctgcagatgttcatgttaactttagtgaacttgcatgctttggctcatgaatccattctgtgtgtttacgatagggataagccaattactgatgttttgtatccaattggttgttacaactttcatcctgcgattgattgggtgagacgttatacactctctattttcatcgtcttttggattgcttttgtccctattgtcgttcaggaattaatcgagcgtggtctgtggaaggcgacacaaagatttttccgtcacattttatctctatctccaatgtttgaagtctttgctggccaaatctattcttcagcactgttaagtgatatcgctgtgggtggtgctcgttatatttcaacaggtcgtggctttgctacatctcgtatacctttctctattctttattcaagatttgcgggttcagccatttatatgggatcaagatcaatgttgatgttattatttggtaccgtggcacattggcaagctccactattatggttttgggcatcattatcagccttaatctttgcaccattcattttcaatccacatcaatttgcttgggaagattttttcctagactacagagattatatcagatggctgtcaagaggtaataataagtaccacaggaactcatggattggttatgtaagaatgtcgaggtctcgtgttactggtttcaagcgcaaactggtgggtgatgagtctgaaaaatctgcaggcgatgcaagcagggctcatagaaccaatttaattatggctgaaattataccgtgtgcgatttacgcagcaggttgttttattgccttcacgtttattaatgcacaaactggtgtcaagactactgatgaagatagagtaaattccaccttacgtatcatcatttgcaccttggcgcctattgttatcgatattggtgttttattcttctgtatgggtttgtcatgctgctctggccctttgttgggcatgtgctgcaagaaaactggttctgttatggcagggatcgctcacggtatcgctgttgttgtccatattgtctttttcattgtcatgtgggttttagagggttttagttttgttaggatgttgattggcgttgttacatgtatacaatgtcaaaggttgatttttcactgtatgactgtactgttgctgacccgtgagttcaagaatgatcacgctaatactgccttttggacaggcaaatggtacagcaccggtttaggatatatggcatggactcaaccgacaagggaattgactgcaaaagtcattgagctttccgagtttgcagcggattttgttttggggcatgtaattttgatcttccaactaccagtcatttgtattccaaagatagataagtttcactccatcatgttattttggttaaaaccatcccgtcaaatccgtcctcctatttactctttgaaacaagcacgcctacgtaaacgtatggttaggaggtattgcagcttgtactttttggtactgatcatattcgcgggatgcatcgttggccctgccgttgcttcagcacatgttccaaaagaccttggatctgggttgacgggtactttccataacttggttcaaccaaggaacgtatctaacaatgatacagggtcccagatgtctacttataagagtcattattacactcatacgccatccttaaagacctggtctacgatcaaatga

SEQ ID NO: 136 - protein, 1895 aa, Saccharomyces cerevisiae
MSYNDPNLNGQYYSNGDGTGDGNYPTYQVTQDQSAYDEYGQPIYTQNQLDDGYYDPNEQYVDGTQFPQGQDPSQDQGPYNNDASYYNQPPNMMNPSSQDGENFSDFSSYGPPSGTYPNDQYTPSQMSYPDQDGSSGASTPYGNGVVNGNGQYYDPNAIEMALPNDPYPAWTADPQSPLPIEQIEDIFIDLTNKFGFQRDSMRNMFDHFMTLLDSRSSRMSPEQALLSLHADYIGGDTANYKKWYFAAQLDMDDEIGFRNMKLGKLSRKARKAKKKNKKAMQEASPEDTEETLNQIEGDNSLEAADFRWKSKMNQLSPFEMVRQIALFLLCWGEANQVRFTPECLCFIYKCASDYLDSAQCQQRPDPLPEGDFLNRVITPLYRFIRSQVYEIVDGRYVKSEKDHNKVIGYDDVNQLFWYPEGIAKIVMEDGTRLIDLPAEERYLKLGEIPWDDVFFKTYKETRSWLHLVTNFNRIWIMHISVYWMYCAYNAPTFYTHNYQQLVDNQPLAAYKWATAALGGTVASLIQVAATLCEWSFVPRKWAGAQHLSRRFWFLCVIMGINLGPVIFVFAYDKDTVYSTAAHVVGAVMFFVAVATLVFFSVMPLGGLFTSYMKKSTRSYVASQTFTASFAPLHGLDRWMSYLVWVTVFAAKYAESYFFLILSLRDPIRILSTTSMRCTGEYWWGNKICKVQPKIVLGLMIATDFILFFLDTYLWYIVVNTVFSVGKSFYLGISILTPWRNIFTRLPKRIYSKILATTDMEIKYKPKVLISQIWNAIIISMYREHLLAIDHVQKLLYHQVPSEIEGKRTLRAPTFFVSQDDNNFETEFFPRDSEAERRISFFAQSLSTPIPEPLPVDNMPTFTVLTPHYAERILLSLREIIREDDQFSRVTLLEYLKQLHPVEWDCFVKDTKILAEETAAYENNEDEPEKEDALKSQIDDLPFYCIGFKSAAPEYTLRTRIWASLRSQTLYRTISGFMNYSRAIKLLYRVENPEIVQMFGGNADGLERELEKMARRKFKFLVSMQRLAKFKPHELENAEFLLRAYPDLQIAYLDEEPPLNEGEEPRIYSALIDGHCEILENGRRRPKFRVQLSGNPILGDGKSDNQNHALIFYRGEYIQLIDANQDNYLEECLKIRSVLAEFEELGIEQIHPYTPGLKYEDQSTNHPVAIVGAREYIFSENSGVLGDVAAGKEQTFGTLFARTLAQIGGKLHYGHPDFINATFMTTRGGVSKAQKGLHLNEDIYAGMNAVLRGGRIKHCEYYQCGKGRDLGFGTILNFTTKIGAGMGEQMLSREYYYLGTQLPIDRFLTFYYAHPGFHLNNLFIQLSLQMFMLTLVNLHALAHESILCVYDRDKPITDVLYPIGCYNFHPAIDWVRRYTLSIFIVFWIAFVPIVVQELIERGLWKATQRFFRHILSLSPMFEVFAGQIYSSALLSDIAVGGARYISTGRGFATSRIPFSILYSRFAGSAIYMGSRSMLMLLFGTVAHWQAPLLWFWASLSALIFAPFIFNPHQFAWEDFFLDYRDYIRWLSRGNNKYHRNSWIGYVRMSRSRVTGFKRKLVGDESEKSAGDASRAHRTNLIMAEIIPCAIYAAGCFIAFTFINAQTGVKTTDEDRVNSTLRIIICTLAPIVIDIGVLFFCMGLSCCSGPLLGMCCKKTGSVMAGIAHGIAVVVHIVFFIVMWVLEGFSFVRMLIGVVTCIQCQRLIFHCMTVLLLTREFKNDHANTAFWTGKWYSTGLGYMAWTQPTRELTAKVIELSEFAADFVLGHVILIFQLPVICIPKIDKFHSIMLFWLKPSRQIRPPIYSLKQARLRKRMVRRYCSLYFLVLIIFAGCIVGPAVASAHVPKDLGSGLTGTFHNLVQPRNVSNNDTGSQMSTYKSHYYTHTPSLKTWSTIK

SEQ ID NO: 137 - DNA, 1191 bp, Saccharomyces cerevisiae
atgaggtttaggagttcttcccatagcttaaaacatgttgacagagaattaaaggagttgattaattcgtccgagaatgccaataaatgcggtgaatgtggtaatttctacccaacttggtgctcagttaatttgggggttttcctttgtggtaggtgtgcctctgttcatagaaaagttttcggtagcagagacgacgatgccttttctaacgttaaatcactatcaatggatagatggacaagagaggatatcgatgaattagtgagtcttggaggcaataaggggaatgctcggttctggaatcctaaaaatgtcccttttccttttgatggagatgatgacaaagccatcgtggagcattacattagagacaagtatattttgggtaaattcaggtatgatgaaataaagcctgaagactttggatccagaatggatgattttgatggggaatcggacaggtttgatgaaagaaatagaagtaggagcaggagcagatctcattctttctataaagggggccataataggtctgactacggcggttccagggactcattccaaagcagtggaagcagatattctaggcaactggcagaactcaaggacatgggtttcggtgatacaaacaaaaatttagatgcattatcgtccgctcacggaaatatcaatagagcaatcgattatctagaaaaaagttcaagttcaagaaatagtgtatcggcagcagcgacaacatcaactccgcccctgcccaggagacgtgcgacaacaagtggcccacagccagctatttttgatggtacaaatgtaatcacgccagattttacttcaaattcagcatcttttgtacaagcaaagccagcagttttcgatggtacccttcaacagtattacgatcctgctaccggaatgatatatgtagatcagcagcaatacgccatggctatgcaacagcagcaacagcaacagcaacagcttgctgtcgcacaggctcaggctcaggcacaggcacaggcacaggctcaagttcaggctcaggctcaggctcaggcccaggctcaggctcaagcacagcagatccagatgcaacagcttcagatgcagcaacagcaacaggcgccattatcttttcagcaaatgtcgcaaggaggaaacctgccacaaggttatttctacacacaataa

SEQ ID NO: 138 - protein, 396 aa, Saccharomyces cerevisiae
MRFRSSSHSLKHVDRELKELINSSENANKCGECGNFYPTWCSVNLGVFLCGRCASVHRKVFGSRDDDAFSNVKSLSMDRWTREDIDELVSLGGNKGNARFWNPKNVPFPFDGDDDKAIVEHYIRDKYILGKFRYDEIKPEDFGSRMDDFDGESDRFDERNRSRSRSRSHSFYKGGHNRSDYGGSRDSFQSSGSRYSRQLAELKDMGFGDTNKNLDALSSAHGNINRAIDYLEKSSSSRNSVSAAATTSTPPLPRRRATTSGPQPAIFDGTNVITPDFTSNSASFVQAKPAVFDGTLQQYYDPATGMIYVDQQQYAMAMQQQQQQQQQLAVAQAQAQAQAQAQAQVQAQAQAQAQAQAQAQQIQMQQLQMQQQQQAPLSFQQMSQGGNLPQGYFYTQ

SEQ ID NO: 139 - DNA, 4509 bp, Saccharomyces cerevisiae
atgtcgaataccccttataattcatctgtgccttccattgcatccatgacccagtcttcggtctcaagaagtcctaacatgcatacagcaactacgcccggtgccaacaccagctctaactctccacccttgcacatgtcttcagattcgtccaagatcaagaggaagcgtaacagaattccgctcagttgcaccatttgtcggaaaaggaaagtcaaatgtgacaaactcagaccacactgccagcagtgcactaaaactggggtagcccatctctgccactacatggaacagacctgggcagaagaggcagagaaagaattgctgaaggacaacgaattaaagaagcttagggagcgcgtaaaatctttagaaaagactctttctaaggtgcactcttctccttcgtctaactccttgaaaagttacaacactcccgagagcagcaacctgtttatgggtagcgatgaacacaccacccttgttaatgcaaatacaggctctgcttcctctgcctcgcatatgcatcagcaacaacagcaacagcagcaacaggaacaacaacaagacttttccagaagtgcgaacgccaacgcgaattcctcgtccctttctatctcaaataaatatgacaacgatgagctggacttaactaaggactttgatcttttgcatatcaaaagtaacggaaccatccacttaggtgccacccactggttgtctatcatgaaaggtgacccgtacctaaaacttttgtggggtcatatcttcgctatgagggaaaagttaaatgaatggtactaccaaaaaaattcgtactctaagctgaagtcaagcaaatgtcccatcaatcacgcgcaagcgccgccttctgccgctgccgccgctaccagaaaatgtcctgttgatcactccgcgttttcgtctggcatggtggccccaaaggaggagactcctcttcctaggaaatgtccagttgaccacaccatgttctcttcgggaatgattcctcccagagaggacacttcgtcccagaagaggtgtcccgttgaccacaccatgtattccgcaggaatgatgccgcccaaggacgagacaccttccccattttccactaaagctatgatagaccataacaagcatacaatgaatccgcctcagtcaaaatgtcctgtggaccatagaaactatatgaaggattatccctctgacatggcaaattcttcttcgaacccggcaagtcgttgccccattgaccattcaagcatgaaaaatacagcggccttaccagcttcaacgcacaataccatcccacaccaccaaccacagtccggatctcatgctcgttcgcatcccgcacaaagcaggaaacatgattcctacatgacagaatctgaagtcctcgcaacactttgtgagatgttgccaccaaagcgcgtcatcgcattattcatcgagaaattcttcaaacatttataccctgccattccaatcttagatgaacagaatttcaaaaatcacgtgaatcaaatgctttcgttgtcttcgatgaatcccacagttaacaactttggtatgagcatgccatcttcatctacactagagaaccaacccataacacaaatcaatcttccaaaactttccgattcttgtaacttaggtattctgataataatcttgagattgacatggctatccataccttctaattcctgcgaagtcgacctgggagaagaaagtggctcatttttagtgcccaacgaatctagcaatatgtctgcatctgcattgacctcgatggctaaagaagaatcacttctgctaaagcatgagacaccggtcgaggcactggagctatgtcaaaaatacttgattaaattcgatgaactttctagtatttccaataacaacgttaatttaaccacggtgcagtttgccattttttacaacttctatatgaaaagtgcctctaatgatttgactaccttgacaaataccaacaacactggcatggccaatcctggtcacgattccgagtctcaccagatcctattgtccaatattactcaaatggcctttagttgtgggttacacagagaccctgataattttcctcaattaaacgctaccattccagcaaccagccaggacgtgtctaacaacgggagcaaaaaggcaaaccctagcaccaatccaactttgaataacaacatgtctgctgccactaccaacagcagtagcagatctggcagtgctgattcaagaagtggttctaaccctgtgaacaagaaggaaaatcaggttagtatcgaaagatttaaacacacttggaggaaaatttggtattacattgttagcatggatgttaaccaatctctttccctggggagccctcgactactaagaaatctgagggatttcagcgatacaaagctaccaagtgcgtcaaggattgattatgttcgcgatatcaaagagttaatcattgtgaagaattttactctttttttccaaattgatttgtgtattattgctgtattaaatcacattttgaatgtttctttagcaagaagcgtgagaaaatttgaactggattcattgattaatttattgaaaaatctgacctatggtactgagaatgtcaatgatgtagtgagctccttgatcaacaaagggttattaccaacttcggaaggtggttctgtagattcaaataatgatgaaatttacggtctaccgaaactacccgatattctaaaccatggtcaacataaccaaaacttgtatgctgatggaagaaatacttctagtagtgatatagataagaaattggaccttcctcacgaatctacaacgagagctctattcttttccaagcatatgacaattagaatgttgctgtacttattgaactacattttgtttactcattatgaaccaatgggcagtgaagatcctggtactaatatcctagctaaggagtacgctcaagaggcattaaattttgccatggatggctacagaaactgcatgattttcttcaacaatatcagaaacaccaattcactattcgattacatgaatgttatcttgtcttacccttgtttggacattggacatcgttctttacaatttatcgtttgtttgatcctgagagctaaatgtggcccattgactggtatgcgtgaatcatcgatcattactaatggtacatcaagtggatttaatagttcggtagaagatgaggacgtcaaagttaaacaagaatcttctgatgaattgaaaaaagacgatttcatgaaagatgtaaatttggattcaggcgattcattagcagagattctaatgtcaagaatgctgctatttcaaaaactaacaaaacaactatcaaagaagtacaactacgctattcgtatgaacaaatccactggattctttgtctctttactagatacaccttcaaagaaatcagactcgaaatcgggtggtagttcattcatgttgggtaattggaaacatccaaaggtttcaaacatgagcggatttcttgctggtgacaaagaccaattacagaaatgccccgtgtaccaagatgcgctggggtttgttagtccaaccggtgctaatgaaggttctgctccgatgcaaggcatgtccttacagggctctactgctaggatgggagggacccagttgccaccaattagatcatacaaacctatcacgtacacaagtagtaatctacgtcgtatgaatgaaacgggtgaggcagaagctaagagaagaagatttaatgatggctatattgataataatagtaacaacgatatacctagaggaatcagcccaaaaccttcaaatgggctatcatcggtgcagccactattatcgtcattttccatgaaccagctaaacgggggtaccattccaacggttccatcgttaaccaacattacttcacaaatgggagctttaccatctttagataggatcaccactaatcaaataaatttgccagacccatctagagatgaagcatttgacaactccatcaagcaaatgacgcctatgacaagtgcattcatgaatgctaatactacaattccaagttcaactttaaacgggaatatgaacatgaatggagctggaactgcgaatacagatacaagtgccaacggcagtgctttatcgacactgacaagcccacaaggctcagacttagcatccaattctgctacacagtataaacctgacttagaagactttttgatgcaaaattctaactttaatgggctaatgataaatccttccagtctggtagaagttgttggtggatacaacgatcctaataaccttggaagaaatgacgcggttgattttctacccgttgataatgttgaaattgatggtgttggaataaaaatcaactatcatctactaactagtatttacgttactagtatattatcatatacggtgttagaagatgacgcaaatgatgagaaatag

SEQ ID NO: 140 - protein, 1502 aa, Saccharomyces cerevisiae
MSNTPYNSSVPSIASMTQSSVSRSPNMHTATTPGANTSSNSPPLHMSSDSSKIKRKRNRIPLSCTICRKRKVKCDKLRPHCQQCTKTGVAHLCHYMEQTWAEEAEKELLKDNELKKLRERVKSLEKTLSKVHSSPSSNSLKSYNTPESSNLFMGSDEHTTLVNANTGSASSASHMHQQQQQQQQQEQQQDFSRSANANANSSSLSISNKYDNDELDLTKDFDLLHIKSNGTIHLGATHWLSIMKGDPYLKLLWGHIFAMREKLNEWYYQKNSYSKLKSSKCPINHAQAPPSAAAAATRKCPVDHSAFSSGMVAPKEETPLPRKCPVDHTMFSSGMIPPREDTSSQKRCPVDHTMYSAGMMPPKDETPSPFSTKAMIDHNKHTMNPPQSKCPVDHRNYMKDYPSDMANSSSNPASRCPIDHSSMKNTAALPASTHNTIPHHQPQSGSHARSHPAQSRKHDSYMTESEVLATLCEMLPPKRVIALFIEKFFKHLYPAIPILDEQNFKNHVNQMLSLSSMNPTVNNFGMSMPSSSTLENQPITQINLPKLSDSCNLGILIIILRLTWLSIPSNSCEVDLGEESGSFLVPNESSNMSASALTSMAKEESLLLKHETPVEALELCQKYLIKFDELSSISNNNVNLTTVQFAIFYNFYMKSASNDLTTLTNTNNTGMANPGHDSESHQILLSNITQMAFSCGLHRDPDNFPQLNATIPATSQDVSNNGSKKANPSTNPTLNNNMSAATTNSSSRSGSADSRSGSNPVNKKENQVSIERFKHTWRKIWYYIVSMDVNQSLSLGSPRLLRNLRDFSDTKLPSASRIDYVRDIKELIIVKNFTLFFQIDLCIIAVLNHILNVSLARSVRKFELDSLINLLKNLTYGTENVNDVVSSLINKGLLPTSEGGSVDSNNDEIYGLPKLPDILNHGQHNQNLYADGRNTSSSDIDKKLDLPHESTTRALFFSKHMTIRMLLYLLNYILFTHYEPMGSEDPGTNILAKEYAQEALNFAMDGYRNCMIFFNNIRNTNSLFDYMNVILSYPCLDIGHRSLQFIVCLILRAKCGPLTGMRESSIITNGTSSGFNSSVEDEDVKVKQESSDELKKDDFMKDVNLDSGDSLAEILMSRMLLFQKLTKQLSKKYNYAIRMNKSTGFFVSLLDTPSKKSDSKSGGSSFMLGNWKHPKVSNMSGFLAGDKDQLQKCPVYQDALGFVSPTGANEGSAPMQGMSLQGSTARMGGTQLPPIRSYKPITYTSSNLRRMNETGEAEAKRRRFNDGYIDNNSNNDIPRGISPKPSNGLSSVQPLLSSFSMNQLNGGTIPTVPSLTNITSQMGALPSLDRITTNQINLPDPSRDEAFDNSIKQMTPMTSAFMNANTTIPSSTLNGNMNMNGAGTANTDTSANGSALSTLTSPQGSDLASNSATQYKPDLEDFLMQNSNFNGLMINPSSLVEVVGGYNDPNNLGRNDAVDFLPVDNVEIDGVGIKINYHLLTSIYVTSILSYTVLEDDANDEK

SEQ ID NO: 141 - DNA, 1665 bp, Saccharomyces cerevisiae
atgaccgcaaagacttttctactacaggcctccgctagtcgccctcgtagtaaccattttaaaaatgagcataataatattccattggcgcctgtaccgatcgccccaaataccaaccatcataacaatagttcgctggaattcgaaaacgatggcagtaaaaagaagaagaagtctagcttggtggttagaacttcaaaacattgggttttgcccccaagaccaagacctggtagaagatcatcttctcacaacactctacctgccaacaacaccaataatattttaaatgttggccctaacagcaggaacagtagtaataataataataataataacatcatttcgaataggaaacaagcttccaaagaaaagaggaaaataccaagacatatccagacaatcgatgaaaagctaataaacgactcgaattacctcgcatttttgaagttcgatgacttggaaaatgaaaagtttcattcttctgcctcctccatttcatctccatcttattcatctccatctttttcaagttatagaaatagaaaaaaatcagaattcatggacgatgaaagctgcaccgatgtggaaaccattgctgctcacaacagtctgctaacaaaaaaccatcatatagattcttcttcaaatgttcacgcaccacccacgaaaaaatcaaagttgaacgactttgatttattgtccttatcttccacatcttcatcggccactccggtcccacagttgacaaaagatttgaacatgaacctaaattttcataagatccctcataaggcttcattccctgattctccagcagatttctctccagcagattcagtctcgttgattagaaaccactccttgcctactaatttgcaagttaaggacaaaattgaggatttgaacgagattaaattctttaacgatttcgagaaacttgagtttttcaataagtatgccaaagtcaacacgaataacgacgttaacgaaaataatgatctctggaattcttacttacagtctatggacgatacaacaggtaagaacagtggcaattaccaacaagtggacaatgacgataatatgtctttattgaatctgccaattttggaggaaaccgtatcttcagggcaagatgataaggttgagccagatgaagaagacatttggaattatttaccaagttcaagttcacaacaagaagattcatcacgtgctttgaaaaaaaatactaattctgagaaggcgaacatccaagcaaagaacgatgaaacctatctgtttcttcaggatcaggatgaaagcgctgattcgcatcaccatgacgagttaggttcagaaatcactttggctgacaataagttttcttatttgcccccaactctagaagagttgatggaagagcaggactgtaacaatggcagatcttttaaaaatttcatgttttccaacgataccggtattgacggtagtgccggtactgatgacgactacaccaaagttctgaaatccaaaaaaatttctacgtcgaagtcgaacgctaacctttatgacttaaacgataacaacaatgatgcaactgccaccaatgaacttgatcaaagcagtttcatcgacgaccttgacgaagatgtcgattttttaaaggtacaagtattttga

SEQ ID NO: 142 - protein, 554 aa, Saccharomyces cerevisiae
MTAKTFLLQASASRPRSNHFKNEHNNIPLAPVPIAPNTNHHNNSSLEFENDGSKKKKKSSLVVRTSKHWVLPPRPRPGRRSSSHNTLPANNTNNILNVGPNSRNSSNNNNNNNIISNRKQASKEKRKIPRHIQTIDEKLINDSNYLAFLKFDDLENEKFHSSASSISSPSYSSPSFSSYRNRKKSEFMDDESCTDVETIAAHNSLLTKNHHIDSSSNVHAPPTKKSKLNDFDLLSLSSTSSSATPVPQLTKDLNMNLNFHKIPHKASFPDSPADFSPADSVSLIRNHSLPTNLQVKDKIEDLNEIKFFNDFEKLEFFNKYAKVNTNNDVNENNDLWNSYLQSMDDTTGKNSGNYQQVDNDDNMSLLNLPILEETVSSGQDDKVEPDEEDIWNYLPSSSSQQEDSSRALKKNTNSEKANIQAKNDETYLFLQDQDESADSHHHDELGSEITLADNKFSYLPPTLEELMEEQDCNNGRSFKNFMFSNDTGIDGSAGTDDDYTKVLKSKKISTSKSNANLYDLNDNNNDATATNELDQSSFIDDLDEDVDFLKVQVF

SEQ ID NO: 143 - DNA, 1812 bp, Saccharomyces cerevisiae
atgcctagaaacccattgaaaaaggaatattgggcagatgtagttgacggattcaagccggctacttctccagccttcgagaatgaaaaagaatctactacatttgttaccgaactaacttccaaaaccgattctgcatttccattaagtagcaaggattcacctggcataaaccaaaccacaaacgatattacctcttcagatcgcttccgtcgtaatgaagacacagagcaggaagacatcaacaacaccaacctgagtaaagatctatccgtgagacatcttttaactctagctgtcgggggtgcaataggtactggtttatatgtgaatacgggtgctgctttatctacaggtggtccggccagtttagttattgattgggttattatcagtacatgtctttttactgtgattaactctcttggtgagctgtccgctgcttttcccgttgttggtgggttcaatgtttacagtatgcgttttattgagccttcatttgcattcgcagtgaacttaaactatttagcacaatggctagttcttctacccttggaattagtggccgcatctattactataaaatactggaatgataaaattaattccgacgcctgggttgctatcttttatgccaccattgcactggctaatatgttggatgttaagtcatttggtgagaccgaatttgtattgtccatgattaaaatcctctccatcattggctttactatcttaggtattgttttgtcctgtggtggtgggcctcacggcggttacattggtggtaaatactggcatgacccaggcgcttttgtagggcacagctcgggaactcagtttaaaggtttatgttcagtttttgttaccgctgccttttcttattccggtattgaaatgactgctgtctccgctgctgaaagtaaaaatccaagagaaaccattcccaaggcagcaaagagaactttttggctgattaccgcctcttatgtgactatattgactttgattggttgcttggttccatccaatgaccctaggttactaaacggttcaagttcagtggacgctgcctcatctcctctggttatcgcaattgaaaacgggggtattaaaggtctaccatcattaatgaacgccattattttgattgctgttgtttccgtggctaacagtgctgtttatgcatgttcaaggtgtatggtcgccatggctcatattggtaatttaccaaaatttttgaaccgtgttgacaaaaggggtagaccaatgaatgctatcttgttaactttgttttttggtttgctttcctttgtggcagcaagtgataagcaagctgaagtctttacatggttgagtgccttatctggtttatcgacaattttctgctggatggccattaatctttcccatattagatttcgccaagccatgaaagttcaagaaaggtctttagacgaattacccttcatttctcaaactggcgtcaagggatcctggtatggttttatcgttttatttctggttcttatagcatcgttttggacttctctgttcccattaggcggttcaggagccagcgcagaatcattctttgaaggatacttatcctttccaattttgattgtctgttacgttggacataaactgtatactagaaattggactttgatggtgaaactagaagatatggatcttgataccggcagaaaacaagtagatttgactcttcgtagggaagaaatgaggattgagcgagaaacattagcaaaaagatccttcgtaacaagatttttacatttctggtgttga

SEQ ID NO: 144 - protein, 603 aa, Saccharomyces cerevisiae
MPRNPLKKEYWADVVDGFKPATSPAFENEKESTTFVTELTSKTDSAFPLSSKDSPGINQTTNDITSSDRFRRNEDTEQEDINNTNLSKDLSVRHLLTLAVGGAIGTGLYVNTGAALSTGGPASLVIDWVIISTCLFTVINSLGELSAAFPVVGGFNVYSMRFIEPSFAFAVNLNYLAQWLVLLPLELVAASITIKYWNDKINSDAWVAIFYATIALANMLDVKSFGETEFVLSMIKILSIIGFTILGIVLSCGGGPHGGYIGGKYWHDPGAFVGHSSGTQFKGLCSVFVTAAFSYSGIEMTAVSAAESKNPRETIPKAAKRTFWLITASYVTILTLIGCLVPSNDPRLLNGSSSVDAASSPLVIAIENGGIKGLPSLMNAIILIAVVSVANSAVYACSRCMVAMAHIGNLPKFLNRVDKRGRPMNAILLTLFFGLLSFVAASDKQAEVFTWLSALSGLSTIFCWMAINLSHIRFRQAMKVQERSLDELPFISQTGVKGSWYGFIVLFLVLIASFWTSLFPLGGSGASAESFFEGYLSFPILIVCYVGHKLYTRNWTLMVKLEDMDLDTGRKQVDLTLRREEMRIERETLAKRSFVTRFLHFWC

SEQ ID NO: 145 - DNA, 1305 bp, Saccharomyces cerevisiae
atgccaaattttcaaaaacctttttctggttcttcggatggcaattctgtaatgaacgacctaggtaataaagtcgccatcaaggtttttgattgtagaagtgctcaagatggcagcgaagagcagaatgtaaatgtaaccacgaaccaaatgtatttaatgtttcaaagtaacaattacaacgtgccgccaccaaattacaataccgaggatttgggttctcaaggacctccgacgcatgcttattacgctccatttcagcatcccatccatcttcaacctcccgtgcctcctgtatataagaacaacacatattctgccacagaccagtatagtgactcctcgtttcctaatacttcaggccacactccagtaattgatagtaattactataatgatgctctggcttctatacctacaacaacgacgggtagtactacaatgactacagacaatggcaatactattgacagcgaagaatacattgataacatggaagtctttagtagcgaggaaaatgaaaacattgataatgtaaagcaaaccgatcttaaatctgaaaaggactcgagtcttctttcagcagcttcaatcgtgaaaaaggaacaattgtctggctttgaaaattttttgcctttatcgaagacagagtctcccttagttactgcagacgagattaaatcatctttgaatttggagaatattgacaatgctgacagtatgagcttcaagttaaaaacttcacctatacggaaacattttcatgttaaacccaaaagaataacaagggtgaggacaggaagggtatcacacaatataattgaaaagaaataccgttccaatattaatgataaaattgaacaattaaggagaactgtcccaacgctacgagtagcgtataaaaaatgtaacgatcttcccattacatctagagacctagcagacttagatggcctagagccagcaacaaaattgaataaggcgtccattttaacgaaatctattgaatatatttgtcatttagaaagaaagtgcctacagctaagcttggctaatcaacatttatcaaatgacacacgggattctttcgtccatcttaccgagccatctcaaccgttgagtgacaacagtagtagtgaacaagtacaaaagcaaaccagaagctgccaacgccaacggcagcggcagccacgacaacaacaaccattgcataacattcaatataatattccacatcaaaacggcctcatgagcggcaccaacaattcacatgatatggattttaacaacgcaggagacttttaa

SEQ ID NO: 146 - protein, 434 aa, Saccharomyces cerevisiae
MPNFQKPFSGSSDGNSVMNDLGNKVAIKVFDCRSAQDGSEEQNVNVTTNQMYLMFQSNNYNVPPPNYNTEDLGSQGPPTHAYYAPFQHPIHLQPPVPPVYKNNTYSATDQYSDSSFPNTSGHTPVIDSNYYNDALASIPTTTTGSTTMTTDNGNTIDSEEYIDNMEVFSSEENENIDNVKQTDLKSEKDSSLLSAASIVKKEQLSGFENFLPLSKTESPLVTADEIKSSLNLENIDNADSMSFKLKTSPIRKHFHVKPKRITRVRTGRVSHNIIEKKYRSNINDKIEQLRRTVPTLRVAYKKCNDLPITSRDLADLDGLEPATKLNKASILTKSIEYICHLERKCLQLSLANQHLSNDTRDSFVHLTEPSQPLSDNSSSEQVQKQTRSCQRQRQRQPRQQQPLHNIQYNIPHQNGLMSGTNNSHDMDFNNAGDF

SEQ ID NO: 147 - DNA, 1077 bp, Saccharomyces cerevisiae
atggatgcaacatcgaggatggagcagcctgatgtctttgtaagcaaactctaccacctgctgcaggggaacgcttactcgaacataatacaatggtcgactgatggcagcaagctcgtcatttggaatccggaccagttcaccaaagtcatcctagagcgattttttggtattcacacctttgcagcattcgttaagcaattgagcaaatataacttccagaaggcgggccgcccggactgcgtggagttttccaacattcattttcaaaaagataacattaatagcctctcactggttaaagctcatcagtctgccgccactcccaatgtcgccgccgtcaataatatgaataagcagtgtacttttcactgggaccctttcaaagtgaactccattctaagcaaggccatcggcaagccttccttcgagaaattagtgaaaaatgttgacaggcttcagggcaatcttgatgagcttaagtcgacaaacgcagatagtctgcgtattataagggaaattaacgccagcttacagacaatctcctaccaccagtttcacgcctaccaaaccgctaacttccttcaagaaaattttgaagccatcaaaaaggttgtatgcccggactcttgtctacaacaccagcaacgccaaccaaagcgccccaaacgctactcgttgctgttactaataccaaacgcatccgaattgtcagaaacacctttgatgcgcttcgccggcgtgttcgaatttatgaactgctctttggatacggccactcagtggcacccgcagttgcatcccgaggcatacgaccttcttttcgtcaccgtgtcgcccaacatgcaacaagaacatctcatctacttcaagagactgagaaacctactcccaagctttcctgtaatagccattattaacagacccgtctcccctcaagataccagcattgctccctccaactactctcgctattatttccaccattttttgcagttggggttcagtgacatcctagttagccccttcaccccaacacaacttataacgctcctttccaaacatcttcgaacgtga

SEQ ID NO: 148 - protein, 358 aa, Saccharomyces cerevisiae [sequence omitted]

SEQ ID NO: 149 - DNA, 1308 bp, Saccharomyces cerevisiae
atgaccactaacgaggaattcattaggacacagatattcggtacagttttcgagatcacaaatagatacaatgatttaaaccccgttgggatgggggcatttgggttggtttgctcagccacggacactttgacatctcagccagttgccattaagaaaatcatgaaacctttttccactgcagtgctggccaaaaggacatatcgtgaactaaaactactaaaacatctaagacacgagaacttgatttgccttcaggacatatttctttctccattggaagatatatattttgtcacggaattacaaggaacagatttacatagactcttgcaaacaagacccttggaaaagcaatttgttcagtatttcctataccaaattctaaggggtttaaaatacgttcactccgcgggcgtcattcatagagatttgaaaccgagcaacattctgattaatgaaaactgtgatttgaagatttgcgatttcggtctagcaagaattcaagaccctcaaatgacaggctatgtttccactagatactacagggcacctgaaatcatgctaacgtggcaaaaatatgacgtcgaggtcgacatttggtccgctggttgtatttttgccgaaatgattgaaggtaagcctttgttccctgggaaagatcatgttcaccaattttcgatcatcactgacttgttgggatctccgccaaaggatgtgataaatactatttgttccgaaaatactctaaaatttgttacttcgttaccacacagagatccaattccattttctgaaagatttaaaacagtcgaacctgatgccgtagaccttttggaaaaaatgctggtttttgatcctaagaagagaatcactgcggcggatgccttggctcatccttattcggctccttaccacgatccaacggatgaaccagtagccgatgccaagttcgattggcactttaatgacgctgatctgcctgtcgatacctggcgtgttatgatgtactcagaaatcctagacttccataagattggtggcagtgatggacagattgatatatctgccacgtttgatgaccaagttgctgcagccaccgctgccgcggcgcaggcacaggctcaggctcaggctcaagttcagttaaacatggctgcgcattcgcataatggcgctggcactactggaaatgatcactcagatatagctggtggaaacaaagtcagcgatcatgtagctgcaaatgacaccattacggactacggtaaccaggccatacagtacgctaatgagttccaacagtaa

SEQ ID NO: 150 - protein, 435 aa, Saccharomyces cerevisiae
MTTNEEFIRTQIFGTVFEITNRYNDLNPVGMGAFGLVCSATDTLTSQPVAIKKIMKPFSTAVLAKRTYRELKLLKHLRHENLICLQDIFLSPLEDIYFVTELQGTDLHRLLQTRPLEKQFVQYFLYQILRGLKYVHSAGVIHRDLKPSNILINENCDLKICDFGLARIQDPQMTGYVSTRYYRAPEIMLTWQKYDVEVDIWSAGCIFAEMIEGKPLFPGKDHVHQFSIITDLLGSPPKDVINTICSENTLKFVTSLPHRDPIPFSERFKTVEPDAVDLLEKMLVFDPKKRITAADALAHPYSAPYHDPTDEPVADAKFDWHFNDADLPVDTWRVMMYSEILDFHKIGGSDGQIDISATFDDQVAAATAAAAQAQAQAQAQVQLNMAAHSHNGAGTTGNDHSDIAGGNKVSDHVAANDTITDYGNQAIQYANEFQQ

SEQ ID NO: 151 - DNA, 4557 bp, Saccharomyces cerevisiae
atgactggtcacgtttcaaaaacgagccacgtacccaaaggtcgcccgtcttcattggccaagaaggcagctaaaagggccatggccaaagtaaattcgaatccaaaaagggcgtcggggcatttggagcgtgttgtacaatctgtgaacgacgctaccaaaagattatctcagcccgactctaccgtaagtgttgctacaaaatcatcaaagagaaaatccagagacacggtgggtccttggaaacttggcaaaacattggggaagggatcttctggtagggttcgcttggctaaaaatatggaaacaggacaattagctgccattaaaattgtccccaagaagaaagcctttgttcattgttctaataatggaactgttcctaattcttactcttcttccatggtcacttccaatgtatcttctccatcaatagcatctagagaacatagtaaccattctcaaacgaacccatatggcatagagagagaaatagtaatcatgaaattgatatctcacacaaacgttatggcattgtttgaagtttgggagaacaaatcagagctgtacctagttttggaatatgttgatggtggcgaattattcgattatctggtctcgaagggaaagctacctgaaagggaggctatccattacttcaagcagatagttgaaggtgtttcctattgtcattcttttaatatatgccatcgtgatctgaagcctgaaaatttattattagataaaaagaataggagaatcaaaattgctgatttcggcatggcagcattagagcttcctaataaacttttaaaaacttcatgtggctctccacactatgcgtctcctgaaattgttatgggtagaccatatcatggcggtcctagcgatgtctggtcctgcggtatcgttttatttgcattactcaccggtcatttaccatttaatgatgacaacatcaaaaagctgttgttgaaagttcaatcgggcaaatatcaaatgccctcaaatttatcttctgaggctcgtgatttgatatcaaaaatattggtaattgatccagaaaaaagaattaccactcaagagatattgaagcatcctctgatcaaaaaatatgatgatctcccagttaataaagtgctgaggaaaatgagaaaggataacatggcgaggggaaaatctaactcggatttgcatttgctaaataatgtctcgccctctattgtaactttacattcaaaaggggaaattgatgaatccatcttgaggagtttgcaaattttgtggcatggagtttctcgtgaactaatcactgccaagttgcttcaaaagccaatgtcggaggaaaaactattctactcactgttattacaatataaacaacgtcactcaatatcattgtcctcgtcaagcgaaaacaagaaatcagcaacagaaagtagcgtaaatgaacctaggattgaatacgcatccaaaactgccaataatacaggcctaaggagcgagaacaatgatgtgaagactttacattctctagaaattcattcagaagatacttcaacagtgaatcagaacaacgcaattacaggggttaatacagaaattaatgcccctgtattggcacaaaaatcgcaatttagtatcaatacgctcagtcaacctgaaagtgataaggctgaagcagaagctgtaacattaccacccgctattcccatattcaatgcttcttcatcaaggattttccgtaactcatacacctctatttcatcacgttcgagaagatcgctacgcttatcgaattccagattatcattgtccgcttcaacttctagagaaactgtgcatgataatgagatgcctctacctcaactgccgaagtcgccttcaagatattcattgtcaagaagggcaatccacgcctccccatctactaaatcaatacataaatcactttcgaggaagaatatagctgcaactgttgccgctagaagaacactacaaaactcggcttcaaagagatccttatactcattacagtcaatttcaaaacgttccttgaacctgaatgatttattagtctttgacgatcctctccctagtaagaaaccagcatccgaaaatgtgaataaatcagaaccccattcgttggaatcagactctgattttgagatcttatgcgatcagatcttatttggaaacgccttagataggatactcgaagaggaagaggacaatgaaaaagaacgcgacacccaaagacagaggcaaaacgatacaaaatcttcggcagacacttttacgatctctggggtgtctacaaataaggaaaatgagggcccggagtatccaaccaaaattgagaaaaatcaattcaatatgtcatataaaccatctgagaatatgtcagggctctcttcatttcctatctttgaaaaagaaaacacgttaagctcaagttatttggaagaacagaagccaaagagagcggccctttcagatatcacgaactcattcaataaaatgaataaacaggaaggtatgaggatagaaaaaaagattcaaagagaacaacttcaaaaaaaaaatgaccgcccgtcaccactcaaacctattcagcaccaagaacttcgtgtaaattctttgcctaatgatcaaggtaaaccgtccttatctctagatccccgccgtaacatctcccagccagtgaattcaaaagtggaatcactattgcagggactgaaattcaaaaaggagccagcctctcactggacccatgagagaggttccttgttcatgagtgaacatgtggaagacgaaaaaccagtcaaagcctcagatgtttcaatcgaaagttcatatgtacctttaacaacagtagcaacatcttcgagagatcccagtgttttagcagaatctagtacaattcaaaaaccaatgctgtctttaccttctagttttttgaacacatctatgacgttcaaaaatcttagccagatactcgctgatgacggtgatgataagcatctaagtgtgccacagaaccaatctagaagtgtagccatgtcacaccctttgcgaaaacaatctgccaaaatatctctaactccacggtctaatttgaacgccaatttatccgttaaacgtaatcagggctcacctggctcctatttgagtaatgatctggatggaatctctgatatgacatttgcgatggaaataccaacaaacacctttaccgctcaggcgattcaactgatgaacaacgacacggacaataataaaatcaatacttcgcccaaagcatcttcttttacaaaagaaaaagtaatcaaatcggcagcctatatctcgaaggaaaaagaaccagataatagcgatactaattatattccagattatactataccaaacacatatgatgaaaaagccattaatatttttgaagatgcgccctccgatgagggttcattaaatacatcttcttcagaaagcgattcacgagcaagtgtgcataggaaagcggtatctattgacactatggcgacaacaaacgttcttactcccgcgacaaatgttagagtaagtctttattggaataataacagttctggtatacccagagagactactgaagagatactttctaaacttagattgtcaccagaaaatccttctaatacacatatgcaaaagaggttttcttccacgcgtggtagtcgtgatagtaatgcattaggcatttctcaaagtttacagtcaatgttcaaagatttggaggaagatcaagatgggcatacttctcaagctgatattcttgaatcaagtatgagctattcaaagcgaagaccatctgaggaaagcgttaatccaaaacaacgagtgacaatgcttttcgatgaggaggaggaagaatctaaaaaagtaggtgggggaaaaattaaagaagagcataccaagctagacaataaaatatccgaggaatcttctcaacttgtgttgccggtggttgaaaaaaaggaaaatgcaaataatacagaaaataactactctaaaataccaaaaccctcaacgattaaagttacgaaggataccgctatggaatcaaatacacaaacccatacaaaaaagccaattctaaaaagtgtccaaaatgttgaagttgaagaagcgccttccagtgataaaaagaattggttcgtcaaactatttcaaaacttttcttctcataataatgctactaaggcatccaagaatcatgtaacgaatatatcatttgatgatgcgcatatgctaacattaaatgaattcaacaagaatagtatcgactatcaattaaagaacctagatcacaaatttgggagaaaggtggtggaatacgattgtaaatttgtaaaaggcaacttcaaattcaaaatcaagattactagcacacccaatgcatcatcggtaattactgtaaaaaaaagaagcaaacattcaaacacaagttccaataaagcctttgaaaagtttaatgatgatgtggagagagtaattcgaaatgccggacgttcataa

SEQ ID NO: 152 - protein, 1518 aa, Saccharomyces cerevisiae
MTGHVSKTSHVPKGRPSSLAKKAAKRAMAKVNSNPKRASGHLERVVQSVNDATKRLSQPDSTVSVATKSSKRKSRDTVGPWKLGKTLGKGSSGRVRLAKNMETGQLAAIKIVPKKKAFVHCSNNGTVPNSYSSSMVTSNVSSPSIASREHSNHSQTNPYGIEREIVIMKLISHTNVMALFEVWENKSELYLVLEYVDGGELFDYLVSKGKLPEREAIHYFKQIVEGVSYCHSFNICHRDLKPENLLLDKKNRRIKIADFGMAALELPNKLLKTSCGSPHYASPEIVMGRPYHGGPSDVWSCGIVLFALLTGHLPFNDDNIKKLLLKVQSGKYQMPSNLSSEARDLISKILVIDPEKRITTQEILKHPLIKKYDDLPVNKVLRKMRKDNMARGKSNSDLHLLNNVSPSIVTLHSKGEIDESILRSLQILWHGVSRELITAKLLQKPMSEEKLFYSLLLQYKQRHSISLSSSSENKKSATESSVNEPRIEYASKTANNTGLRSENNDVKTLHSLEIHSEDTSTVNQNNAITGVNTEINAPVLAQKSQFSINTLSQPESDKAEAEAVTLPPAIPIFNASSSRIFRNSYTSISSRSRRSLRLSNSRLSLSASTSRETVHDNEMPLPQLPKSPSRYSLSRRAIHASPSTKSIHKSLSRKNIAATVAARRTLQNSASKRSLYSLQSISKRSLNLNDLLVFDDPLPSKKPASENVNKSEPHSLESDSDFEILCDQILFGNALDRILEEEEDNEKERDTQRQRQNDTKSSADTFTISGVSTNKENEGPEYPTKIEKNQFNMSYKPSENMSGLSSFPIFEKENTLSSSYLEEQKPKRAALSDITNSFNKMNKQEGMRIEKKIQREQLQKKNDRPSPLKPIQHQELRVNSLPNDQGKPSLSLDPRRNISQPVNSKVESLLQGLKFKKEPASHWTHERGSLFMSEHVEDEKPVKASDVSIESSYVPLTTVATSSRDPSVLAESSTIQKPMLSLPSSFLNTSMTFKNLSQILADDGDDKHLSVPQNQSRSVAMSHPLRKQSAKISLTPRSNLNANLSVKRNQGSPGSYLSNDLDGISDMTFAMEIPTNTFTAQAIQLMNNDTDNNKINTSPKASSFTKEKVIKSAAYISKEKEPDNSDTNYIPDYTIPNTYDEKAINIFEDAPSDEGSLNTSSSESDSRASVHRKAVSIDTMATTNVLTPATNVRVSLYWNNNSSGIPRETTEEILSKLRLSPENPSNTHMQKRFSSTRGSRDSNALGISQSLQSMFKDLEEDQDGHTSQADILESSMSYSKRRPSEESVNPKQRVTMLFDEEEEESKKVGGGKIKEEHTKLDNKISEESSQLVLPVVEKKENANNTENNYSKIPKPSTIKVTKDTAMESNTQTHTKKPILKSVQNVEVEEAPSSDKKNWFVKLFQNFSSHNNATKASKNHVTNISFDDAHMLTLNEFNKNSIDYQLKNLDHKFGRKVVEYDCKFVKGNFKFKIKITSTPNASSVITVKKRSKHSNTSSNKAFEKFNDDVERVIRNAGRS

SEQ ID NO: 153 - DNA, 1461 bp, Saccharomyces cerevisiae
atggttcatttaggtccaaaaaaaccacaagccagaaagggttccatggccgatgtgccaaaggaattgatgcaacaaattgagaattttgaaaaaattttcactgttccaactgaaactttacaagccgttaccaagcacttcatttccgaattggaaaagggtttgtccaagaagggtggtaacattccaatgattccaggttgggttatggatttcccaactggtaaggaatccggtgatttcttggccattgatttgggtggtaccaacttgagagttgtcttagtcaagttgggcggtgaccgtacctttgacaccactcaatctaagtacagattaccagatgctatgagaactactcaaaatccagacgaattgtgggaatttattgccgactctttgaaagcttttattgatgagcaattcccacaaggtatctctgagccaattccattgggtttcaccttttctttcccagcttctcaaaacaaaatcaatgaaggtatcttgcaaagatggactaaaggttttgatattccaaacattgaaaaccacgatgttgttccaatgttgcaaaagcaaatcactaagaggaatatcccaattgaagttgttgctttgataaacgacactaccggtactttggttgcttcttactacactgacccagaaactaagatgggtgttatcttcggtactggtgtcaatggtgcttactacgatgtttgttccgatatcgaaaagctacaaggaaaactatctgatgacattccaccatctgctccaatggccatcaactgtgaatacggttccttcgataatgaacatgtcgttttgccaagaactaaatacgatatcaccattgatgaagaatctccaagaccaggccaacaaacctttgaaaaaatgtcttctggttactacttaggtgaaattttgcgtttggccttgatggacatgtacaaacaaggtttcatcttcaagaaccaagacttgtctaagttcgacaagcctttcgtcatggacacttcttacccagccagaatcgaggaagatccattcgagaacctagaagataccgatgacttgttccaaaatgagttcggtatcaacactactgttcaagaacgtaaattgatcagacgtttatctgaattgattggtgctagagctgctagattgtccgtttgtggtattgctgctatctgtcaaaagagaggttacaagaccggtcacatcgctgcagacggttccgtttacaacagatacccaggtttcaaagaaaaggctgccaatgctttgaaggacatttacggctggactcaaacctcactagacgactacccaatcaagattgttcctgctgaagatggttccggtgctggtgccgctgttattgctgctttggcccaaaaaagaattgctgaaggtaagtccgttggtatcatcggtgcttaa

SEQ ID NO: 154 - protein, 486 aa, Saccharomyces cerevisiae
MVHLGPKKPQARKGSMADVPKELMQQIENFEKIFTVPTETLQAVTKHFISELEKGLSKKGGNIPMIPGWVMDFPTGKESGDFLAIDLGGTNLRVVLVKLGGDRTFDTTQSKYRLPDAMRTTQNPDELWEFIADSLKAFIDEQFPQGISEPIPLGFTFSFPASQNKINEGILQRWTKGFDIPNIENHDVVPMLQKQITKRNIPIEVVALINDTTGTLVASYYTDPETKMGVIFGTGVNGAYYDVCSDIEKLQGKLSDDIPPSAPMAINCEYGSFDNEHVVLPRTKYDITIDEESPRPGQQTFEKMSSGYYLGEILRLALMDMYKQGFIFKNQDLSKFDKPFVMDTSYPARIEEDPFENLEDTDDLFQNEFGINTTVQERKLIRRLSELIGARAARLSVCGIAAICQKRGYKTGHIAADGSVYNRYPGFKEKAANALKDIYGWTQTSLDDYPIKIVPAEDGSGAGAAVIAALAQKRIAEGKSVGIIGA

SEQ ID NO: 155 - DNA, 1083 bp, Saccharomyces cerevisiae
atgcaagcggatatgcatggaaaacttcacgctgccttagaagatggtttcttcctctttccttttgaacagcaacaacaacctaacatttattatgacacaaccaccgatcaagaagaccgtccttgtttttcttttggatctacaatttcccctagaagttggcattttgaaaagtctgacaaaattgcctcatctcagctgcagaacttggttcatacacaaccaattcatttaattaatcctcaaatattgttcaatgaagagtttctgaatttggaaaatattgattctcagcctatttccaaggaaacgaaaactacgaaggactgcacaatggcaactggtcctgaaagaggaaaaaagagctctgaaagtaccagatcctcttcattatcatctcttttttctaatgatgaatccgcatctacgttccactcatcattcaataaccatgataactttcaaaagagcaacagaaatggagatgatatcgatattagtgacacaataaaatatgaaactaatacaaatgcacaaaaagatatcaaaatattccaagaaaattttgaattcaatgaattcccatacacacaagacttctacccatataccactaattatacctattcaaaacccacaaatattcatgaatcaataaattcaaaaaacacggattcatactcccaatatcaagatcagtttccaccacatactgataacatacattcctttaataatcgtcactatagcaaccataaaagcactaattgtaattactataataataccagcaataataacaacgcctccgataatgtatatgaggcagatccatttatagatgaacctcaggtgccctcctactattacccattagaaattgccttcgacgttgaaaaatcaccaccgccatcactacaaaaattaaattcaaaagagttagaattcctaaaaaagttgaactccaaactgtcaagatatgctgcggcttactccttcagcagttctaatgatcaagattattatgacaaggtcaggtttcaagaaatatcctacaagtttagtaaaacctattcttaa

SEQ ID NO: 156 - protein, 360 aa, Saccharomyces cerevisiae
MQADMHGKLHAALEDGFFLFPFEQQQQPNIYYDTTTDQEDRPCFSFGSTISPRSWHFEKSDKIASSQLQNLVHTQPIHLINPQILFNEEFLNLENIDSQPISKETKTTKDCTMATGPERGKKSSESTRSSSLSSLFSNDESASTFHSSFNNHDNFQKSNRNGDDIDISDTIKYETNTNAQKDIKIFQENFEFNEFPYTQDFYPYTTNYTYSKPTNIHESINSKNTDSYSQYQDQFPPHTDNIHSFNNRHYSNHKSTNCNYYNNTSNNNNASDNVYEADPFIDEPQVPSYYYPLEIAFDVEKSPPPSLQKLNSKELEFLKKLNSKLSRYAAAYSFSSSNDQDYYDKVRFQEISYKFSKTYS

SEQ ID NO: 157 - DNA, 1803 bp, Saccharomyces cerevisiae
atgattaacgataaactagtacattttctgatccagaattatgatgacatcctaagagcaccgctttctggacagctcaaagatgtgtattcactgtacatcagtggcggatacgatgatgagatgcagaagttgagaaacgataaagacgaggtcttacagtttgaacagttttggaatgatcttcaggatattatatttgcaacgccgcagtccattcaatttgaccagaatctattagtggcagataggccagaaaaaattgtttacctggacgttttttccttgaaaattctctataacaagttccatgccttctactatacattaaaatcgtccagttcttcatgtgaagaaaaagtgtcgagtttaacaacaaaaccggaagctgattcggaaaaagaccaactgctgggtagactgcttggagtcctgaactgggacgttaacgtcagcaaccaggggttaccacgtgaacaactgagcaatcgcttacaaaatttattgagggaaaaaccatcatcttttcagcttgctaaagaaagagccaaatacacgaccgaggtcattgaatacatcccgatatgtagtgactattcgcatgcatctctattgtccacctcggtgtacattgtcaataacaaaatcgtttctttacaatggtccaaaatatccgcatgtcaggaaaatcacccaggattaattgagtgcattcaatcaaaaattcactttatccctaatatcaaaccacaaactgatatttcgttaggagattgttcctatttggatacctgtcataaattaaatacgtgtcgatacattcattacctgcaatatattccgtcatgcttgcaagagcgagctgatcgtgaaactgcgagtgaaaataaaagaatacggtcaaacgtttccattccattttatactctgggcaattgctccgcacattgtatcaaaaaggctttacctgcacagtggatccgttgcgatgtgcggaaatttgattttagggttcttggaaagttttcggtagttattgcagatcctgcatggaatatccatatgaacctaccatacggtacttgcaacgatattgaactattaggtttgcctttgcacgaactacaagatgaaggtattatttttctttgggtgacgggtagagctatagaattgggtaaagagtctttgaataactggggttacaacgtgataaatgaagtttcatggataaagacaaaccaactgggtagaacaattgttacaggtcgtacgggtcattggttaaatcattctaaggagcatttattggtgggcttaaagggtaatccaaagtggatcaacaaacatattgacgtcgatttgatcgtatcaatgaccagagagactagtagaaagcctgatgaactgtatggtatagcagaacggttggcaggcacccatgccagaaaactagagatattcggaagggatcacaatacgcggcctggctggtttaccatcggaaaccagttgacaggaaattgcatttacgaaatggatgtcgagaggaagtaccaggagtttatgaagagcaaaactggaaccagccacactggtactaaaaaaatcgacaaaaagcaaccttcaaaattacagcagcagcatcagcagcagtattggaataatatggatatggggagtggtaagtattatgctgaggccaagcagaatcctatgaatcaaaaacatactccctttgaatccaaacagcaacaaaaacaacaattccaaacactaaataacctatattttgctcagtaa

SEQ ID NO: 158 - protein, 600 aa, Saccharomyces cerevisiae
MINDKLVHFLIQNYDDILRAPLSGQLKDVYSLYISGGYDDEMQKLRNDKDEVLQFEQFWNDLQDIIFATPQSIQFDQNLLVADRPEKIVYLDVFSLKILYNKFHAFYYTLKSSSSSCEEKVSSLTTKPEADSEKDQLLGRLLGVLNWDVNVSNQGLPREQLSNRLQNLLREKPSSFQLAKERAKYTTEVIEYIPICSDYSHASLLSTSVYIVNNKIVSLQWSKISACQENHPGLIECIQSKIHFIPNIKPQTDISLGDCSYLDTCHKLNTCRYIHYLQYIPSCLQERADRETASENKRIRSNVSIPFYTLGNCSAHCIKKALPAQWIRCDVRKFDFRVLGKFSVVIADPAWNIHMNLPYGTCNDIELLGLPLHELQDEGIIFLWVTGRAIELGKESLNNWGYNVINEVSWIKTNQLGRTIVTGRTGHWLNHSKEHLLVGLKGNPKWINKHIDVDLIVSMTRETSRKPDELYGIAERLAGTHARKLEIFGRDHNTRPGWFTIGNQLTGNCIYEMDVERKYQEFMKSKTGTSHTGTKKIDKKQPSKLQQQHQQQYWNNMDMGSGKYYAEAKQNPMNQKHTPFESKQQQKQQFQTLNNLYFAQ

SEQ ID NO: 159 - DNA, 915 bp, Saccharomyces cerevisiae
atgcaacaagcaactgggaacgaattactgggtatcctagatctggataacgatatagactttgaaactgcttaccaaatgctcagcagtaacttcgacgaccaaatgtctgcgcacatacatgaaaacacgtttagtgcaacttcccctcctctgttaacacacgagctcggcataattcctaacgtagcaaccgtgcaaccctctcacgtagaaactatacctgccgataaccaaactcatcatgctcctttgcatactcatgcacactatctaaatcacaaccctcatcaaccaagcatgggttttgatcaagcgcttggtctcaagttgtctccttccagttcggggttgttgagcacgaatgaatcgaatgccattgaacagtttttagacaatctaatatcacaggatatgatgtcttccaacgcttccatgaactccgaatcacatctacatataagatcaccaaaaaagcagcataggtataccgaattaaatcaaagatatcctgaaacacatccacacagtaacacaggggagttacccacaaacacagcagatgtgccaactgagttcaccacgagggaaggacctcatcagcctatcggcaatgaccactacaacccgccaccgttttcagtacctgagatacgaatcccagactctgatattccagccaatatcgaggacgaccctgtgaaggtacggaaatggaaacacgttcaaatggagaagatacgaagaataaacaccaaagaagcctttgaaaggctcattaaatcagtaaggaccccaccgaaggaaaacgggaaaagaattcccaagcatattcttttaacttgtgtaatgaacgatatcaagtccattagaagcgcaaatgaagcactacagcacatactggatgattcctga

SEQ ID NO: 160 - protein, 304 aa, Saccharomyces cerevisiae
MQQATGNELLGILDLDNDIDFETAYQMLSSNFDDQMSAHIHENTFSATSPPLLTHELGIIPNVATVQPSHVETIPADNQTHHAPLHTHAHYLNHNPHQPSMGFDQALGLKLSPSSSGLLSTNESNAIEQFLDNLISQDMMSSNASMNSESHLHIRSPKKQHRYTELNQRYPETHPHSNTGELPTNTADVPTEFTTREGPHQPIGNDHYNPPPFSVPEIRIPDSDIPANIEDDPVKVRKWKHVQMEKIRRINTKEAFERLIKSVRTPPKENGKRIPKHILLTCVMNDIKSIRSANEALQHILDDS

SEQ ID NO: 161 - DNA, 1602 bp, Saccharomyces cerevisiae
atgaacttgtggagacatagtccagaagaattggctgcttacaatagctgtcatccaatgaagctaggttcaggggtgctgatacaattgcctctttatgacaattcggcagtatatgcagaagatattacttttaggagtttctgctgtgaaagagtgcccgtttatgtatctacggtgctaagaaactcttccccatataggtatcttgatgaggtgatcaatgactggcaaaaattcattcaagtaagcgattatgtcggcggttctgctgagtatgcgatttatgctgtgattttgtcgataacttctaattttgtcatcacagtgttcctgactgtgatatgctgtataaatatcagcgggcgcgcatataagagaattctacaactactgaggatagcctcgttgttagcctcgttgaacttaacgatttttatcacgaaggtgttgcggagattggaaaaagagcacaatgtctatggtgtcgttcgggctcattccattatgcacatcttttccgatgatatgacatttgttgtcttggatttcttggctactttaatgttccaattttgccaagtcggcattgtcattaggctatttcaaagagctcaggaaaagagaataattttttttattggggtgatattaacaataaccgcaaatattttatgggtaattccaccgtttgctaaccatactacaaaacacagaaatgactggcagattctgcggccatttgtttaccttttccgtattgccatcgccacgtcatatgcatcaatcgtcatttatcacatctggcagaaaaaaaaattgtggtttaaattcaatcaaatgggtttacttacgctattgactattcttgtggtgcttctattaccgggtttcttccttgccgatgtgtcgaacttatggatatcggaactgggtgaagtgtttaacacgacatgctatgtcacttcgaccgtgatcacatgggagtggctggatagattaaatgttttggaaagaaaagaggaagcgcaaagcattttgggaagacctatcttcgaggaagagcaacaagactatcggtttgccaagtacgccttaagggttcaaaacgctttaaccaggagggaatctcaggacgcatcaacggatcggcacgatacgtcaagtaattcggaagtatgtgatttacagaccatatcacgctacgacccagaagatcagatatcagtgggcagaagcattgatcgaatgcatttcaatgataggggaacttataaagatgtagcgctgaagaaattaggctatgcgcgtgataaaattttatactttacagaccaaatcgtccagaaaagcgtaggccacaataatagcagcagctcgaaaaatgaaaaaaccaaacagagaaaggccatggtcaggaaacggttgggattagacaaaccaggcatatacatttattcgacaaaggatgtcgttttcaattcagatgaagatgacgatgagaacgcggaagatgaagatgacgatgaatatgaagttggcagtgaaggcaataacaatagctctgccacttttaccagcgaccatataggccatatttga

SEQ ID NO: 162 - protein, 533 aa, Saccharomyces cerevisiae
MNLWRHSPEELAAYNSCHPMKLGSGVLIQLPLYDNSAVYAEDITFRSFCCERVPVYVSTVLRNSSPYRYLDEVINDWQKFIQVSDYVGGSAEYAIYAVILSITSNFVITVFLTVICCINISGRAYKRILQLLRIASLLASLNLTIFITKVLRRLEKEHNVYGVVRAHSIMHIFSDDMTFVVLDFLATLMFQFCQVGIVIRLFQRAQEKRIIFFIGVILTITANILWVIPPFANHTTKHRNDWQILRPFVYLFRIAIATSYASIVIYHIWQKKKLWFKFNQMGLLTLLTILVVLLLPGFFLADVSNLWISELGEVFNTTCYVTSTVITWEWLDRLNVLERKEEAQSILGRPIFEEEQQDYRFAKYALRVQNALTRRESQDASTDRHDTSSNSEVCDLQTISRYDPEDQISVGRSIDRMHFNDRGTYKDVALKKLGYARDKILYFTDQIVQKSVGHNNSSSSKNEKTKQRKAMVRKRLGLDKPGIYIYSTKDVVFNSDEDDDENAEDEDDDEYEVGSEGNNNSSATFTSDHIGHI

SEQ ID NO: 163 - DNA, 609 bp, Saccharomyces cerevisiae
atgtctgcattacctccagtatactcattccctccactatatacccgtcaacccaattctttaacaaggagacaacagataagtacgtggatagacatcatatcacaatattgcaagaccaagaaaatttggtacatgtctgttgacgggactgtaatcaatgacaacgaactagatagtggaagtacagataatgacgattcaaaaaaaatctcgaaaaatctttttaataatgaggacatccaaagatctgtatcacaggtatttattgatgaaatttggtcgcaaatgaccaaagaaggcaaatgcttaccgattgaccaaagtggtaggagaagcagcaataccaccactacgagatattttatattatggaagagcttagacagttgggcttctttgatactacagtggttcgaagactctggaaaactgaatcaagtcattacgttatacgaattgagtgaaggtgatgaaacagtcaattgggagttccatagaatgcccgaaagcttgctctattattgtttgaagcccctatgcgatagaaatagggccacaatgctgaaagatgaaaatgataaagtaattgccattaaggttgtttaa

SEQ ID NO: 164 - protein, 202 aa, Saccharomyces cerevisiae
MSALPPVYSFPPLYTRQPNSLTRRQQISTWIDIISQYCKTKKIWYMSVDGTVINDNELDSGSTDNDDSKKISKNLFNNEDIQRSVSQVFIDEIWSQMTKEGKCLPIDQSGRRSSNTTTTRYFILWKSLDSWASLILQWFEDSGKLNQVITLYELSEGDETVNWEFHRMPESLLYYCLKPLCDRNRATMLKDENDKVIAIKVV

SEQ ID NO: 165 - DNA, 1986 bp, Saccharomyces cerevisiae
atgagtgaactgcttgccattccacttaagcgaactttagaagtggactttgccacggagttgtcaaaactaattgatactacttcctttcaaacggcatcctttttccaatcagacatactcaaagttgttgatgcaagaaacaatgcgattgcacccgatatctcaatcgacggtctttctgcactgaaggaatactatgtaatattgttgcaattagagaaaaagtttcccaataatcaaatagaatttacatggtttcaaacgctatcacaaaaatctcgtggtactagtcaatactcattacaatgggaaaaattaaccattatttataatattggttgcatgtattcactgttggctctaaatagcaacaatgatgcagccgaatccctcaaaacgtcatgtctgtacttccagaatgccgccggatgctttaaacatgttttagaccaccaaaaaaatcttgagacaatcccagtggtagatgacgccacattgaacgctttaacctccctgatgctagcacaagcgcaagaatgcttctggtttaaagccgtgcaagataaacacaaggactccttaatcgcgaagttgtcacaacagatcgtggacttctactgcgaggctattaatgacgcccaaagggggaaacttattagaagtgattggataaaccacttaaaggctaaaaaggcttactttagtgcggtgacttattacagaatagccttatcttttaatgagaagaagcagttcggaaatgttgtgaaagctctgcaaatgggattgcaatttataaatgaatcaacactatcttcgcaagctaagtttaaaactgttgtcgaatcttctctgaaagaagcccaaagagacaatgaattcatctacttacaagaagttccttcggaattaccatcgatcaaaccagctctcatggttaaaccatcttcttcagcaacattgttgccttctattaaaaaggatgagactttattcaaagacctaatccctatagaagtgatggaatattgcacagcatacaatgaaaggcaagatgaatacgttgaacaacgtgttaccaatccccttgcttccctaaataaactattgaaggagtccttgactactttccaaataccacaagggcttacaaaggtgagtgaagcagaactgagtcattaccaggcatcactgaataatcttctcattaataataaaaatgtgcaggtacaactcgataacattgagcaaattttaaatgaagaagcatttactgacaatcagctccgactaaaacacggaaccttaaattggactttacccgaatcttcaactactaacacagcatattatgaaaaactaaaaaagctgagaggataccttgatgaaggtagtgcgattgacaaacaaacaaatgaactatttcaaagcatcgataaaaatttgattggatcagagatcaggttaccggaatctaatgatcctctaacgaataagattaagatgatcatacaggaaagaaatgattatattgataggacgaggcggaaatcttcagaatatagaatacttccaaagatcattacatcgtataaaaaaaatggaacagtcgactttgaacccattttcataggccatttaaaatactttgacgaagatttaagatacgttaatagtacaaaggaagaaaatatcaaacttattgaggaagtaaacctaagtaagaagaataaccccggcagaagcgggattgaaccaaagaaaatggtaagaatagatcccagagagctatatattgaagatctgagatattccttcaaactgcttgatgaggtgaaagaaaatttaagtgccggcacagcattttacgaaaatttaattacttctaccagcaatctgtacaatgaggtacaggaatatgatacagcaagaagagcagaaaaagctaggcttgataagagtttgacatttgaagaccaatga

SEQ ID NO: 166 - protein, 661 aa, Saccharomyces cerevisiae
MSELLAIPLKRTLEVDFATELSKLIDTTSFQTASFFQSDILKVVDARNNAIAPDISIDGLSALKEYYVILLQLEKKFPNNQIEFTWFQTLSQKSRGTSQYSLQWEKLTIIYNIGCMYSLLALNSNNDAAESLKTSCLYFQNAAGCFKHVLDHQKNLETIPVVDDATLNALTSLMLAQAQECFWFKAVQDKHKDSLIAKLSQQIVDFYCEAINDAQRGKLIRSDWINHLKAKKAYFSAVTYYRIALSFNEKKQFGNVVKALQMGLQFINESTLSSQAKFKTVVESSLKEAQRDNEFIYLQEVPSELPSIKPALMVKPSSSATLLPSIKKDETLFKDLIPIEVMEYCTAYNERQDEYVEQRVTNPLASLNKLLKESLTTFQIPQGLTKVSEAELSHYQASLNNLLINNKNVQVQLDNIEQILNEEAFTDNQLRLKHGTLNWTLPESSTTNTAYYEKLKKLRGYLDEGSAIDKQTNELFQSIDKNLIGSEIRLPESNDPLTNKIKMIIQERNDYIDRTRRKSSEYRILPKIITSYKKNGTVDFEPIFIGHLKYFDEDLRYVNSTKEENIKLIEEVNLSKKNNPGRSGIEPKKMVRIDPRELYIEDLRYSFKLLDEVKENLSAGTAFYENLITSTSNLYNEVQEYDTARRAEKARLDKSLTFEDQ

SEQ ID NO: 167 - DNA, 1377 bp, Saccharomyces cerevisiae
atgtaccaaggcccaccgcaaccgcctcctcaagctgtgccgatgccttacattgtgaataataacacaccaccgtacccaaatggtaatattaactttcctcccaccgcgcagcagaatataccgcccacggtttatccacaacaagtgccatttccaggtcaaccacaggggggtcaatttccacagccttcatcagaacagcaggtgtttaaccagcttccacaagtgactcaaacttttcacaactctgcgcagaatacgaatgcaactgggggccctggcagcgggtctatgccaatgtttacgccggtagcatcctttccccatcccatggctacagcagcaacggcagctgctccgttaccacggtctgcatcccaggcatctttatctatgttacgggtgccgtatcatgtaagaaaatacttatctaatttggcgatgttgaaattgtacgaaataataaatgaggtgaatacggcaatgggtaagattggcctgctttcattctggacagaattaatatcagatatttttacacctgatgcagttataaggtatagtaaaaagtctatgacagattatagagaattcgaatttatcatcccagtgttcccagttatttgctctacattaggcagatttggcatcgttagaatggaagttaaggttttacaattgaaaacacaagttctaagtaattctacgatttttttcaactgtcctcgtgtcacatttgtctattattatcctgatggttcatatattacacatttttcccaaatgaaaggtgctttcgatttggacttgaaaattaattggctggacgtatctatgcatagttttgtccctgatattgaatggaatgcagtggaacggcttttgagtgatgacacaaagtctacagaaattgaacaaatattccgtaaattgaaacaagaagatgtcaaagagcaagggaattcttttgcagaaaataatgctacgaatgttcctccgaattttgaggccatcactcagctgagatcatattttgacgtattcagaaacgtctctgtgtttggcactcaagaagggttgatgagagtcatgcaaataagtaccgttatgtctactttgaaaaaccttcgaaagtttcaaattgaaaagaacattgatagtcccgtgaccgccctaagtgcgtacattgacgccgacaagaaggacagtggaagcgagcccttgcacgcaaagaggcgacgcaacagcggtatctctcctcgcaccacgacgttggggccaaacggcaactccaatacaagcaatgaagagcttccaacaagtgatgtgaatgatattaacaaagacatgacaaaaaagaagatgaagttttaa

SEQ ID NO: 168 - protein, 458 aa, Saccharomyces cerevisiae
MYQGPPQPPPQAVPMPYIVNNNTPPYPNGNINFPPTAQQNIPPTVYPQQVPFPGQPQGGQFPQPSSEQQVFNQLPQVTQTFHNSAQNTNATGGPGSGSMPMFTPVASFPHPMATAATAAAPLPRSASQASLSMLRVPYHVRKYLSNLAMLKLYEIINEVNTAMGKIGLLSFWTELISDIFTPDAVIRYSKKSMTDYREFEFIIPVFPVICSTLGRFGIVRMEVKVLQLKTQVLSNSTIFFNCPRVTFVYYYPDGSYITHFSQMKGAFDLDLKINWLDVSMHSFVPDIEWNAVERLLSDDTKSTEIEQIFRKLKQEDVKEQGNSFAENNATNVPPNFEAITQLRSYFDVFRNVSVFGTQEGLMRVMQISTVMSTLKNLRKFQIEKNIDSPVTALSAYIDADKKDSGSEPLHAKRRRNSGISPRTTTLGPNGNSNTSNEELPTSDVNDINKDMTKKKMKF

SEQ ID NO: 169 - DNA, 1629 bp, Saccharomyces cerevisiae
atgtcgttactgagactgtggaacaaagaatcaagggcaccatcaaaaataaagagtcatggtattgttggcagttacggcaacagcatgctggcccataacaacgtgaagcaatttcgtatagacatagacgaaccgcatagagtatggaaaccgaatgaaagcataaccggagaagcggtcattgacataaagagagacataactaacgtagcgatcaaattatcgctagtatgtgaggttcgcgtgaaaacggggaacagtccaacctccaagaataagagaattgagaaaaccttagagaagtcgacgtttctttatggacaggactacgtaaagacagctttttcggctaaggaaaagaaaccgcatgttgacaaaaccaccattctcaatggtttaagcaagggggaacacaggtttccctttaggatacgaataccacgaggcagaggaatgttgagctctataaagttcgaaaggggctcgataacatacttcctctcttgcactttagaatccctcaacaacatcaacggattaaaaaaaccggaagcaagatgcgaacgtgagtttgcagtcatagttccgctggacgtctcgaggctgcccaagccgaaaactaagacagtggttttacaatcagcatctatggtccaaaacaaaaagaacaaatctacagaggacgaatcctcatcgtatacacaattaactcaaaagtctactacttctaattcttctagcagttcagtaaactccaagacgtcccccttaccaaataaaacggtgactatatccgtagacataccgcaggctggattcatgattggtgaaattatccctatagacgttaagattgaccactataagcctttctatgcccctgcgggtctcaccaccactttggtgaggatatgtagggtgggcggtgcaggcaaagatgatcctatggagactttcagaaaagatatatgtcagagtatctctcctatatatattaaccctgaaacgttgcagtttcaatctagagtttatctgaaagtgccccttgatgcattttcgacccttactactgtgggaaaatttttctccttccaatactatatcgaggttatggttaacttatcaaaaaaaaacgtggtttacacagaatctaatagaataataggaactcctattggagaacaaaatggcttgggcgtagagaataatatcaaccgtatccaaaggaaaatgctacgtatggtcaatccagaaacgttggagaacgattctgagggttatgaatccagtatatttttcaaagatatggtaaatgtggaaaagctaaagagactgaggaatgtaactggtatgtccatagaaaccgtcataggaacgacgagatccgaacagcagcaatctgatgcaagcatcccatcccaatcctcaatcacggctcctcaaaattctccatcgaatttaagagattggttggccccattaaatgcatatgatagtgacgatgttccagttccaaagtattcgccaaatgataaagtcagtgtaccgtcggaagacaaacaagaacttgaacaaaaaagactacaacagttagaaagcgatcctcccccttgtgatgactattaa

SEQ ID NO: 170 - protein, 542 aa, Saccharomyces cerevisiae
MSLLRLWNKESRAPSKIKSHGIVGSYGNSMLAHNNVKQFRIDIDEPHRVWKPNESITGEAVIDIKRDITNVAIKLSLVCEVRVKTGNSPTSKNKRIEKTLEKSTFLYGQDYVKTAFSAKEKKPHVDKTTILNGLSKGEHRFPFRIRIPRGRGMLSSIKFERGSITYFLSCTLESLNNINGLKKPEARCEREFAVIVPLDVSRLPKPKTKTVVLQSASMVQNKKNKSTEDESSSYTQLTQKSTTSNSSSSSVNSKTSPLPNKTVTISVDIPQAGFMIGEIIPIDVKIDHYKPFYAPAGLTTTLVRICRVGGAGKDDPMETFRKDICQSISPIYINPETLQFQSRVYLKVPLDAFSTLTTVGKFFSFQYYIEVMVNLSKKNVVYTESNRIIGTPIGEQNGLGVENNINRIQRKMLRMVNPETLENDSEGYESSIFFKDMVNVEKLKRLRNVTGMSIETVIGTTRSEQQQSDASIPSQSSITAPQNSPSNLRDWLAPLNAYDSDDVPVPKYSPNDKVSVPSEDKQELEQKRLQQLESDPPPCDDY

SEQ ID NO: 171 - DNA, 9279 bp, Saccharomyces cerevisiae
atgaatcaaagcgatccgcaagacaaaaaaaatttcccaatggaatactctttgaccaagcatcttttttttgataggcttctacttgttcttcccatagaatctaatttgaaaacatatgctgatgtggaggcagattcagttttcaattcgtgtcggtccatcattttgaatatagccatcactaaggacttgaacccgattatcgaaaacacattaggtttaattgacttgattgtgcaagatgaagaaattacgtctgacaatattacagatgatattgcccattctatattggttcttttgagattactgagtgatgtttttgagtattactgggatcaaaacaatgacttcaagaaaattagaaacgataattacaaaccgggattttcaagtcacaggccaaacttccatacatctaggccaaagcacacgagaatcaatccagctttggcgacgatgttactatgtaaaatttctaagctgaagttcaatacaagaactttaaaggttttacagaacatgtctcaccatctttctggcagcgctactatctcaaaatcgagtattttacccgattcacaggaatttttacaaaagagaaactatccagcatataccgagaaaatagatttaacaatagattatatccagagattcatatctgcttccaatcatgttgaattcacaaagtgtgtcaaaacaaaagttgttgcacctttattgatatcacacacctcaaccgaattgggcgtagtaaaccacttggatttatttggttgtgagtatttgactgataagaatctgctagcatatctggacatactacaacacctgtcaagttacatgaagaggaccatttttcattcgcttttgttatattatgcttccaaagcttttttattttggataatggcaaggccaaaagaatacgtcaaaatttataacaatctaatatcatcagattataatagtccgtcttcttcatctgataatggtggttcgaataattctgataaaacgtctatatcccaactagtctcactgttattcgatgacgtttattccacttttagtgtatcatcattattaacaaatgtcaataatgaccaccactaccatcttcatcattcatcttcttcatcaaagacgaccaacactaatagtccaaactctatatcaaaaacgtcgataaagcagtcgagtgtgaatgcttctggcaatgtttctccgtctcagttttctactgggaatgatgcatcgcctacttcccctatggcatcattgagttcacccttaaacacgaacatcctagggtatccgttatctccaatcacttcaacactaggacaggcgaatacttccacatcgactacggctgcaactaccaaaacagatgcagatacgccctctactatgaatactaacaacaataataacaataacaacagcgctaatcttaataatattccacaacgcatattttccttagatgacatttcatcctttaactcgagtagaaaatcactcaatctagatgatagtaactccttgtttctttgggatacttctcagcattctaatgcatcgatgacaaatacaaatatgcatgcaggagttaataattctcagtctcagaacgatcagtcttctttaaactatatggaaaatattatggagctgtattccaactataccggatcagaactatcctcccatactgccatattaaggtttttggtggttctgaccttattagacagtgaagtatatgatgagatgaactcaaattcgtatagaaaaatttcggaaccgataatgaatattaatccgaaggactctaatacttcaagttggggctcagcatccaaaaacccaagtatcaggcacctcacccatggcttaaaaaaacttactttacagcaaggcaggaaacgtaacgttaaatttttgacatatttgattagaaatttgaatgggggacagttcgtttcagatgtttccttgattgactctatcaggtccattctattcttaatgacaatgacgtcttctatatcccaaatcgattcaaatattgcttctgttattttttcgaagagattctacaacttgttgggtcaaaatttagaggtcggcaccaattggaattctgccactgcaaatacttttatttctcattgtgttgaaaggaatccccttacacataggcgtttacaattagagttttttgcaagcggtttacagctggattctgatttatttttaagacatttacaactggaaaaagaactcaatcacatagaccttcccaaaatatcgttatacactgaaggatttagggtattttttcacctagtaagcaccaaaaaacttcatgaggatattgcagaaaaaacctcctctgtgttaaagagacttttctgcataattgctgatattttgttgaaagcaacgccttattttgacgataatgtaaccaagattattgcttctatattggatgggcatattttagatcaatttgacgctgcgcgaacactttctaatgatgatcatgtcagttttgatgctgccacaagcgtttacactgagccaaccgaaattattcataactcatcggatgcctcgttagtctcttcactttcccaatcacccttatcaattaactcaggaagcaatatcaccaatacgcgcacctgggatattcaatcaatcttaccaaccttatcgaacagatcaagtgcttctgatttgagcttgtctaacattttgactaatccgttggaggcacaacaaaataataatgcaaacttgttagcccatagattatctggggttcctactactaagagatacgcttcaccgaacgactctgaaagatcacgacaaagtccatattcttctccgccgcaattgcaacaaagtgacttgccttctccgctctcagtcctctcgtcaagtgcaggattttcttctaatcattcgattacggcaaccccaactattttgaaaaacatcaaatctccaaaaccaaacaaaacaaaaaaaattgctgatgataaacaattgaaacagccttcttattcaagagtaatactgagtgacaatgatgaagcaagaaagattatgatgaacattttcagcattttcaaaagaatgaccaactggtttatacgcccagatgctaatacagaattcccgaagacttttacggatattataaaaccactttttgtctctatattggattctaatcaaagactacaagttacagcgcgggcttttattgaaatcccattaagttatatagctacttttgaagacattgataatgatcttgacccaagagtactgaatgaccattatttgttatgtacatatgccgttactttgtttgcttcatcattgtttgatttgaagttagaaaatgcgaagagagagatgctactagacattattgttaaatttcaacgagtccgttcttatttatcaaatttagcagaaaaacacaacctagtccaggcaataattacgacggagaggttgacgctgccattattagttggtgctgtaggaagtggaattttcatttcattatactgcagtcgtggaaatacgccacgcttaataaaaatttcatgttgtgaatttctacgatccttgagattttatcaaaaatacgtaggcgctttggatcaatattccatttacaatattgatttcatagatgctatggcccaggacaatttcactgcctcaggatcagtggctttgcaacggcgtctaagaaataatattttaacttatatcaaaggatccgactcaatccttttggattcaatggacgtgatttacaagaagtggttttacttcagctgttcgaaatcagttacgcaagaggaactagtagattttagaagcttggcaggcattctagcttctatgtcaggtattctgtctgatatgcaagagttggaaaaaagcaagagcgctccagataatgaaggagacagcttatcatttgagtcacgaaatcccgcttatgaggtgcacaaaagtcttaaactcgagttaacgaaaaaaatgaatttctttatttcaaaacaatgtcaatggttgaataatccaaatctattaacaagagaaaattcgagagatatattaagtattgagttgcatcctctatcttttaacttattgtttaacaacctaggactgaaaatagatgaactgatgtcaattgatctttcaaagtcacatgaggattcatcgtttgttttactagagcagataataattataataagaactatactaaagagggatgatgatgaaaagataatgctactcttttcgacggacttgcttgatgcggtcgataagttgatcgaaatagtggagaaaatttccatcaagtcctccaaatattataagggaattatccaaatgtcgaaaatgtttagagcatttgagcactctgaaaagaacctgggcatttcaaatcatttccatttaaagaataaatggttgaagttagttattggttggttcaaactatctattaataaggattatgattttgaaaacctgtcaagaccattaagggaaatggatttgcagaaaagggacgaagattttttgtatatcgacacttctattgaatctgcaaaagcattggcttacctaacacataatgttcctttagaaataccgccttcaagctcaaaagaagattggaacagatcttctacagtatcatttggcaatcactttactattttgttaaaaggtctggagaaaagcgcggacctgaatcagtttccagtttcattaaggcataagatcagtatacttaatgaaaatgtaataatagcgctaacgaacttatctaatgccaatgtcaacgtttctttaaaattcactttaccaatgggttattctccaaataaagatatcagaatcgcctttttaagagttttcatcgacatagtaaccaactatccagttaaccctgagaaacatgaaatggataaaatgctagctatagacgacttcctgaaatatataatcaagaacccaatattagcatttttcggaagtttagcgtgttctcctgctgatgttgatttatatgctggtggattcttaaacgcctttgacactagaaatgcgtctcatatccttgttactgagctccttaaacaagaaatcaaacgggccgcaagatcagacgatattctcagaagaaatagttgtgcaacaagggctttgtcactttacactagatctagaggtaacaaatatttgataaaaactttgagacccgttttgcaagggatagtggataacaaggagtcttttgaaattgataagatgaaaccaggatccgaaaactccgaaaagatgttagacttatttgagaagtacatgacaagattaattgacgcaattacaagttctattgatgatttcccaatagaattagttgatatctgtaaaacaatttacaatgctgctagtgtaaattttccagaatacgcatatattgccgttgggtcattcgttttcttgaggtttatcgggcctgctttagttagtcctgattcggaaaatatcattattgttacgcacgcccatgacagaaagccctttattacactagctaaagttattcaaagtttagctaatggcagggaaaatatattcaagaaagatatcttagtttcaaaagaagagtttttgaaaacctgtagtgataaaatattcaattttttgtctgaattgtgcaagataccgactaacaatttcaccgtcaatgtaagagaagatccgacaccaataagctttgactactcatttttgcataaattcttttacctcaatgagtttaccataagaaaagaaattattaatgaatccaaattaccaggggagttcagctttttgaaaaatactgttatgctcaacgacaaaattcttggtgtattgggacaacctagcatggaaataaaaaatgaaattcctccttttgtagtcgagaatcgggaaaaatatccttcattgtatgaattcatgagtcgctatgccttcaaaaaagtggacatgaaagaagaagaagaggataatgcgccatttgtacatgaagcaatgacattggatggcatacaaatcattgtcgtaacttttaccaattgcgagtacaataattttgtaatggactcactggtctataaagttctgcagatatatgcaagaatgtggtgctctaaacattatgtagttatcgattgtaccaccttttatgggggtaaggctaatttccaaaaattgactactctatttttcagtttgataccagagcaagcatcaagtaattgtatgggatgttattacttcaacgtcaacaaatcatttatggaccaatgggcctcatcatatactgtagaaaatccgtacttggtcactacaattccccgttgtttcatcaacagcaatactgaccaaagtttgataaagtccttaggattgagtggtaggagtttggaagttttgaaagatgtaagagttactttgcatgatattaccctttatgacaaggaaaaaaagaagttttgtcccgtgtccttgaagataggaaacaaatacttccaagttttacatgagattccgcagttgtacaaggttaccgtatcaaacaggacattcagcatcaaattcaacaatgtttacaagatatcaaatttaatttcagtcgatgtctctaacaccacaggcgtttcctcggaatttacgttaagtcttgataatgaagaaaagttggtattttgcagtccgaagtacctagaaattgtgaaaatgttttattatgcccagttaaagatggaagaagactttggtacggatttttcgaacgatatttcattttcaacatcctcttcagcagttaatgcttcttactgcaatgttaaagaagttggtgaaattatatcacatttgtcattggtgatccttgtaggtttattcaatgaggatgatctcgtcaaaaacatatcatacaaccttctcgtggcaacgcaagaagcatttaatttagattttgggacaaggcttcacaaatccccagagacatatgtacccgatgataccaccacgttcttggccctaattttcaaggctttttcagaatcttcaacggaactaactccatatatatggaaatatatgctggatggccttgaaaacgacgtgattcctcaagaacatattcctacggttgtctgttcattgtcatactgggtaccaaacttatatgaacatgtatatttggcaaatgacgaagagggaccagaggcgatttcacgtataatctatagcttaatcaggttgacggtcaaagagccaaatttcacgacagcttaccttcaacagatttggtttttactggcattggatggtcgtctcacgaacgtgatagttgaagaaatagtaagtcatgcgctggatagagattcagaaaacagagactggatgaaagctgtgtcaatactaaccagttttccaacgacagagattgcttgtcaggtaatagagaagctaataaatatgatcaaatcttttctaccttctctagcagttgaggcttccgcacacagttggtctgagcttactattttatcaaaaattagtgtgtcaattttctttgaatcacccttactttcccagatgtatttaccggagattcttttcgctgtgtctctgttaattgatgtcggtccttcggaaataagagtctcattgtacgagttgttgatgaatgtttgtcattctttaaccaacaatgagtccttacctgaaaggaataggaaaaatttggatatcgtctgtgcaacattcgcacgtcaaaagttgaactttatctccggttttagccaagaaaaaggtagagttttaccaaattttgccgcttcctccttctccagtaaattcggaacattagatctcttcactaaaaacattatgctattgatggaatatggttctatttcagagggtgcacaatgggaggcaaaatataagaaatatttgatggatgcgatttttggccatcggtcgttcttctctgcgagagctatgatgattctaggtataatgagtaagtcgcacacgtcccttttcctttgtaaagaacttttagttgaaaccatgaaggtcttcgcagagccagttgtggatgatgaacaaatgttcatcattatagctcatgtctttacttacagcaaaattgtcgaagggttagatccttcttcagaattaatgaaagagctattttggcttgctacaatatgtgttgaatcccctcatcctttactctttgaaggtggtctcctgttcatggtaaattgtttgaagcgactgtacacggtccatcttcaacttggattcgatggcaaatcgctagccaaaaaattaatggaatctagaaattttgctgctacgcttttggctaagttagagtcatacaatggatgcatatggaacgaagataattttcctcatattattttaggtttcattgcaaacggtttatccattcctgtcgtaaaaggagccgcattagattgtctacaggcccttttcaagaatacatattacgaaagaaagtccaacccaaaatcctccgattatctttgttaccttttcttactccatttggtcttaagtcctgaacaactttctaccttgttacttgaagtcggcttcgaagatgaactggtacctttaaataatacactaaaagtgccacttactttgatcaactggctaagttcagactcagataaatctaatatagtcttataccaaggagcacttttgtttagctgtgttatgtcagacgaaccatgtaaattccgttttgctctattgatgaggtatttgctcaaagtcaaccctatttgtgtattcaggttctatacgctgactagaaaggaattcaggaggttatcaaccctagaacaatcatctgaagcggttgctgtctcttttgaattgattgggatgcttgttacacacagtgagtttaattacctagaggaatttaatgatgaaatggtcgaacttttaaaaaagagaggcttgtcagttgtgaagcctctggatatttttgatcaggaacatatagaaaagttaaaaggagagggtgaacatcaagtggcaatttatgagagaaaaagattagcaacaatgatactggcaagaatgtcgtgctcctaa

SEQ ID NO: 172 - protein, 3092 aa, Saccharomyces cerevisiae
MNQSDPQDKKNFPMEYSLTKHLFFDRLLLVLPIESNLKTYADVEADSVFNSCRSIILNIAITKDLNPIIENTLGLIDLIVQDEEITSDNITDDIAHSILVLLRLLSDVFEYYWDQNNDFKKIRNDNYKPGFSSHRPNFHTSRPKHTRINPALATMLLCKISKLKFNTRTLKVLQNMSHHLSGSATISKSSILPDSQEFLQKRNYPAYTEKIDLTIDYIQRFISASNHVEFTKCVKTKVVAPLLISHTSTELGVVNHLDLFGCEYLTDKNLLAYLDILQHLSSYMKRTIFHSLLLYYASKAFLFWIMARPKEYVKIYNNLISSDYNSPSSSSDNGGSNNSDKTSISQLVSLLFDDVYSTFSVSSLLTNVNNDHHYHLHHSSSSSKTTNTNSPNSISKTSIKQSSVNASGNVSPSQFSTGNDASPTSPMASLSSPLNTNILGYPLSPITSTLGQANTSTSTTAATTKTDADTPSTMNTNNNNNNNNSANLNNIPQRIFSLDDISSFNSSRKSLNLDDSNSLFLWDTSQHSNASMTNTNMHAGVNNSQSQNDQSSLNYMENIMELYSNYTGSELSSHTAILRFLVVLTLLDSEVYDEMNSNSYRKISEPIMNINPKDSNTSSWGSASKNPSIRHLTHGLKKLTLQQGRKRNVKFLTYLIRNLNGGQFVSDVSLIDSIRSILFLMTMTSSISQIDSNIASVIFSKRFYNLLGQNLEVGTNWNSATANTFISHCVERNPLTHRRLQLEFFASGLQLDSDLFLRHLQLEKELNHIDLPKISLYTEGFRVFFHLVSTKKLHEDIAEKTSSVLKRLFCIIADILLKATPYFDDNVTKIIASILDGHILDQFDAARTLSNDDHVSFDAATSVYTEPTEIIHNSSDASLVSSLSQSPLSINSGSNITNTRTWDIQSILPTLSNRSSASDLSLSNILTNPLEAQQNNNANLLAHRLSGVPTTKRYASPNDSERSRQSPYSSPPQLQQSDLPSPLSVLSSSAGFSSNHSITATPTILKNIKSPKPNKTKKIADDKQLKQPSYSRVILSDNDEARKIMMNIFSIFKRMTNWFIRPDANTEFPKTFTDIIKPLFVSILDSNQRLQVTARAFIEIPLSYIATFEDIDNDLDPRVLNDHYLLCTYAVTLFASSLFDLKLENAKREMLLDIIVKFQRVRSYLSNLAEKHNLVQAIITTERLTLPLLVGAVGSGIFISLYCSRGNTPRLIKISCCEFLRSLRFYQKYVGALDQYSIYNIDFIDAMAQDNFTASGSVALQRRLRNNILTYIKGSDSILLDSMDVIYKKWFYFSCSKSVTQEELVDFRSLAGILASMSGILSDMQELEKSKSAPDNEGDSLSFESRNPAYEVHKSLKLELTKKMNFFISKQCQWLNNPNLLTRENSRDILSIELHPLSFNLLFNNLGLKIDELMSIDLSKSHEDSSFVLLEQIIIIIRTILKRDDDEKIMLLFSTDLLDAVDKLIEIVEKISIKSSKYYKGIIQMSKMFRAFEHSEKNLGISNHFHLKNKWLKLVIGWFKLSINKDYDFENLSRPLREMDLQKRDEDFLYIDTSIESAKALAYLTHNVPLEIPPSSSKEDWNRSSTVSFGNHFTILLKGLEKSADLNQFPVSLRHKISILNENVIIALTNLSNANVNVSLKFTLPMGYSPNKDIRIAFLRVFIDIVTNYPVNPEKHEMDKMLAIDDFLKYIIKNPILAFFGSLACSPADVDLYAGGFLNAFDTRNASHILVTELLKQEIKRAARSDDILRRNSCATRALSLYTRSRGNKYLIKTLRPVLQGIVDNKESFEIDKMKPGSENSEKMLDLFEKYMTRLIDAITSSIDDFPIELVDICKTIYNAASVNFPEYAYIAVGSFVFLRFIGPALVSPDSENIIIVTHAHDRKPFITLAKVIQSLANGRENIFKKDILVSKEEFLKTCSDKIFNFLSELCKIPTNNFTVNVREDPTPISFDYSFLHKFFYLNEFTIRKEIINESKLPGEFSFLKNTVMLNDKILGVLGQPSMEIKNEIPPFVVENREKYPSLYEFMSRYAFKKVDMKEEEEDNAPFVHEAMTLDGIQIIVVTFTNCEYNNFVMDSLVYKVLQIYARMWCSKHYVVIDCTTFYGGKANFQKLTTLFFSLIPEQASSNCMGCYYFNVNKSFMDQWASSYTVENPYLVTTIPRCFINSNTDQSLIKSLGLSGRSLEVLKDVRVTLHDITLYDKEKKKFCPVSLKIGNKYFQVLHEIPQLYKVTVSNRTFSIKFNNVYKISNLISVDVSNTTGVSSEFTLSLDNEEKLVFCSPKYLEIVKMFYYAQLKMEEDFGTDFSNDISFSTSSSAVNASYCNVKEVGEIISHLSLVILVGLFNEDDLVKNISYNLLVATQEAFNLDFGTRLHKSPETYVPDDTTTFLALIFKAFSESSTELTPYIWKYMLDGLENDVIPQEHIPTVVCSLSYWVPNLYEHVYLANDEEGPEAISRIIYSLIRLTVKEPNFTTAYLQQIWFLLALDGRLTNVIVEEIVSHALDRDSENRDWMKAVSILTSFPTTEIACQVIEKLINMIKSFLPSLAVEASAHSWSELTILSKISVSIFFESPLLSQMYLPEILFAVSLLIDVGPSEIRVSLYELLMNVCHSLTNNESLPERNRKNLDIVCATFARQKLNFISGFSQEKGRVLPNFAASSFSSKFGTLDLFTKNIMLLMEYGSISEGAQWEAKYKKYLMDAIFGHRSFFSARAMMILGIMSKSHTSLFLCKELLVETMKVFAEPVVDDEQMFIIIAHVFTYSKIVEGLDPSSELMKELFWLATICVESPHPLLFEGGLLFMVNCLKRLYTVHLQLGFDGKSLAKKLMESRNFAATLLAKLESYNGCIWNEDNFPHIILGFIANGLSIPVVKGAALDCLQALFKNTYYERKSNPKSSDYLCYLFLLHLVLSPEQLSTLLLEVGFEDELVPLNNTLKVPLTLINWLSSDSDKSNIVLYQGALLFSCVMSDEPCKFRFALLMRYLLKVNPICVFRFYTLTRKEFRRLSTLEQSSEAVAVSFELIGMLVTHSEFNYLEEFNDEMVELLKKRGLSVVKPLDIFDQEHIEKLKGEGEHQVAIYERKRLATMILARMSCS

SEQ ID NO: 173 - DNA, 1332 bp, Saccharomyces cerevisiae
atgaacagtacacctcctacgtcacccgtcaccagggtttctgatggttcctttccatccataagtaacaatagtaagggttttgcttatcgccaaccgcaaaaacataaaagtaacttcgcatattcacatctggtatctcctgtagaggagccgacagctaaattcagtgaggcattccagacagattattctagtaaggcgcccgttgctacctcggaggcgcacctaaagaacgatttagacgtattgttcactaccccccggttttactctccggagaatttggctttaatgttccgtctttctaatacagtttcttccctagaatttctggatgagtttttgatgggcatattacttgctccagagatggattttttgtcaaatccaagttattctcttccgtctaacaaattagtgggacagggaagttattcatatgtgtaccctatatcatcaagtgcttcatcaagatgtaacaacgattcaggggttgttttaaagtttgccaaatcacagcataaaagcaaggtgattttacaggaagctttgacgctagcatatctccagtacatgagtccttcaaccaatgaaagtcatattattccattctatgggttgacatacataactaaatcccattttagaagactgaggtccaacgaatgtgttcctggccttattcttccgaaatgcgaaatgagtttatatcacttcaatacagcagtgtcacataagctttcgttgataacaaaaagaaaaatatggtggagacttatgaagcaaatgatagacgcattaaaatctttgaaaacaaatggtataattcatggtgatataaaaacagcaaatattttaataacagaaatgcatgttcttaatggaggccattgtaaggattttgacttctaccttgctgactttacgtcggcatttcacattaatcaaacaccaacagatctgaataccacggtagaatactgtgcaccagaactaattgatagctcctccgatcatgttcctacatttgaatcggatttgtatgccgtggggctttgtcttttatcatttatatcgcagcatgagccttacaacgaacttcaggcgttagtgtcgcatggatcctctccaggtattggcagttcatctatacagcagtcccaatggctgataaatgctcttttgaaaaaagatcctataaatctaaacatgttaagaaacgatttattccaggattggaagtcagaactagcattattgtccagaattctggttgatagacttcctctagaaaatctcataactatactcgatagtaactatatatga

SEQ ID NO: 174 - protein, 443 aa, Saccharomyces cerevisiae
MNSTPPTSPVTRVSDGSFPSISNNSKGFAYRQPQKHKSNFAYSHLVSPVEEPTAKFSEAFQTDYSSKAPVATSEAHLKNDLDVLFTTPRFYSPENLALMFRLSNTVSSLEFLDEFLMGILLAPEMDFLSNPSYSLPSNKLVGQGSYSYVYPISSSASSRCNNDSGVVLKFAKSQHKSKVILQEALTLAYLQYMSPSTNESHIIPFYGLTYITKSHFRRLRSNECVPGLILPKCEMSLYHFNTAVSHKLSLITKRKIWWRLMKQMIDALKSLKTNGIIHGDIKTANILITEMHVLNGGHCKDFDFYLADFTSAFHINQTPTDLNTTVEYCAPELIDSSSDHVPTFESDLYAVGLCLLSFISQHEPYNELQALVSHGSSPGIGSSSIQQSQWLINALLKKDPINLNMLRNDLFQDWKSELALLSRILVDRLPLENLITILDSNYI

SEQ ID NO: 175 - DNA, 2163 bp, Saccharomyces cerevisiae
atgcctttgagaaatctaactgaaacgcacaactttagtagcacaaacctggacacagatggtacaggcgacgatcatgatggtgctcctctttcctcatctccttcttttggacaacaaaatgacaatagcaccaacgataatgctggtctcacaaacccttttatggggagtgacgaagaatctaatgcgcgggatggagaatctctgtcttcttctgttcattatcagccacaggggagtgactcttcactacttcatgacaattctcgtctagatctaagtcaaaataaaggtgtatctgattacaaaggttactattccaggaacaatagtagagctgtgagtacggctaatgataactcatttcttcagccaccacatagagctatagcctcttctccttctttgaattctaatttatcgaagaatgatattctctcaccgccagaatttgatagatatcccttagtgggttccagagtcacttctatgactcaactgaaccatcatggtcgctcgccaacatcatctccaggaaacgagtcgtccgcctcattctcttctaatccgtttttgggcgagcaagatttttctccatttggtgggtatcctgcttcatcgttcccacttatgatagatgaaaaggaagaagatgattatttacacaatcctgaccccgaagaagaggcaagactggatagaaggaggttcatagatgacttcaagtacatggataaaaggtctgctagtgggctagctggtgtattgctcttgtttctggcagccatctttatttttattgttttgccagcgttgacctttaccggtgctattgatcacgaaagcaacactgaagaagttacatatttaactcaataccaatatcctcaactatccgccattagaacatctctggttgacccagacacacctgatacagcgaagacaagagaagctatggatggctctaagtgggaattagtattttctgatgagtttaatgcagaaggcagaacattttatgatggggatgatccatactggacagcccctgatgttcactatgatgctactaaggatttagaatggtacagtccagacgcttccacaactgtgaacggaaccttgcagctgagaatggatgcctttaagaaccatggcttatattacagatcaggtatgttgcagagttggaataaggtttgtttcacgcagggtgctctagaaatctctgcaaatctaccaaattatggccgtgtttcaggtttgtggcccggtctttggactatgggtaatttagggaggcccggttatttggctagtacccaaggtgtctggccttattcttatgaatcgtgtgatgctggtattacacccaaccaaagttccccggatggtatttcttacttgccgggacaaaagttaagtatttgtacttgtgatggtgaagatcatccgaatcaaggtgttggtagaggagctccagaaattgatgttttggaaggtgaaactgatactaagattggtgtaggtatagcctctcaatccttgcaaattgcaccttttgatatctggtacatgcctgactatgattttatcgaggtttacaatttcacaacaacgaccatgaacacttatgctggcggtccatttcaacaagccgtatctgctgtctcaactttgaacgtaacttggtatgaattcggtgagtacggtggctactttcaaaaatatgccattgagtatctgaacgatgacgacaatggttatatccgttggtttgttggtgatactccaacttatactattcatgctaaagccttacatcctgatggtaatattggttggagaagaatcagtaaagaaccaatgtcgattattctaaatctgggtatttccaacaattgggcttatattgattggcagtatattttcttcccagtggttatgtcgattgactatgttagaatataccaaccaagtaatgctatatccgtgacatgcgatccaagtgactatccaacatatgattatattcaatcgcacttaaatgcattccagaatgcaaacttaactacttgggaagatgctggttacacgttccctaagaatatcctaactggtaaatgtactagctcgaagttcaagttatcctcttaa

SEQ ID NO: 176 - protein, 720 aa, Saccharomyces cerevisiae
MPLRNLTETHNFSSTNLDTDGTGDDHDGAPLSSSPSFGQQNDNSTNDNAGLTNPFMGSDEESNARDGESLSSSVHYQPQGSDSSLLHDNSRLDLSQNKGVSDYKGYYSRNNSRAVSTANDNSFLQPPHRAIASSPSLNSNLSKNDILSPPEFDRYPLVGSRVTSMTQLNHHGRSPTSSPGNESSASFSSNPFLGEQDFSPFGGYPASSFPLMIDEKEEDDYLHNPDPEEEARLDRRRFIDDFKYMDKRSASGLAGVLLLFLAAIFIFIVLPALTFTGAIDHESNTEEVTYLTQYQYPQLSAIRTSLVDPDTPDTAKTREAMDGSKWELVFSDEFNAEGRTFYDGDDPYWTAPDVHYDATKDLEWYSPDASTTVNGTLQLRMDAFKNHGLYYRSGMLQSWNKVCFTQGALEISANLPNYGRVSGLWPGLWTMGNLGRPGYLASTQGVWPYSYESCDAGITPNQSSPDGISYLPGQKLSICTCDGEDHPNQGVGRGAPEIDVLEGETDTKIGVGIASQSLQIAPFDIWYMPDYDFIEVYNFTTTTMNTYAGGPFQQAVSAVSTLNVTWYEFGEYGGYFQKYAIEYLNDDDNGYIRWFVGDTPTYTIHAKALHPDGNIGWRRISKEPMSIILNLGISNNWAYIDWQYIFFPVVMSIDYVRIYQPSNAISVTCDPSDYPTYDYIQSHLNAFQNANLTTWEDAGYTFPKNILTGKCTSSKFKLSS

SEQ ID NO: 177 - DNA, 1107 bp, Saccharomyces cerevisiae
atggctagaaccataacttttgatatcccttcccaatataaactcgtagatttaataggtgagggagcgtacggaacagtatgttcagcaattcataagccttccggcataaaggtagctatcaagaaaatacaaccgtttagcaaaaaattgtttgttacaagaactatacgtgagatcaagcttttacggtatttccatgaacacgaaaacataataagtatattggataaagtaaggccagtatccatagacaaactaaacgctgtttatttagtcgaagagttgatggaaaccgatttacaaaaagtaattaataatcagaatagcgggttttccactttaagtgatgaccatgttcaatactttacataccaaatcctcagagccttaaagtctattcacagtgcacaagttatccatagagacataaagccatcaaacctgttactaaattccaattgtgatctcaaagtctgcgattttggactagcgaggtgtttagctagcagtagcgattcaagagaaacattggtaggattcatgacggagtacgtcgcaacgcgatggtacagggcacccgagataatgctaacttttcaagagtacacaactgcgatggatatatggtcatgcggatgcattttggctgaaatggtctccgggaagcctttgttcccaggcagagactatcatcatcaattatggctaattctagaagtcttgggaactccatctttcgaagactttaatcagatcaaatccaagagggctaaagagtatatagcaaacttacctatgaggccacccttgccatgggagaccgtctggtcaaagaccgatctgaatccagatatgatagatttactagacaaaatgcttcaattcaatcctgacaaaagaataagcgcagcagaagctttaagacacccttacctggcaatgtaccatgacccaagtgatgagccggaatatcctccacttaatttggatgatgaattttggaaactggataacaagataatgcgtccggaagaggaggaagaagtgcccatagaaatgctcaaagacatgctttacgatgaactaatgaagaccatggaatag

SEQ ID NO: 178 - protein, 368 aa, Saccharomyces cerevisiae
MARTITFDIPSQYKLVDLIGEGAYGTVCSAIHKPSGIKVAIKKIQPFSKKLFVTRTIREIKLLRYFHEHENIISILDKVRPVSIDKLNAVYLVEELMETDLQKVINNQNSGFSTLSDDHVQYFTYQILRALKSIHSAQVIHRDIKPSNLLLNSNCDLKVCDFGLARCLASSSDSRETLVGFMTEYVATRWYRAPEIMLTFQEYTTAMDIWSCGCILAEMVSGKPLFPGRDYHHQLWLILEVLGTPSFEDFNQIKSKRAKEYIANLPMRPPLPWETVWSKTDLNPDMIDLLDKMLQFNPDKRISAAEALRHPYLAMYHDPSDEPEYPPLNLDDEFWKLDNKIMRPEEEEEVPIEMLKDMLYDELMKTME

SEQ ID NO: 179 - DNA, 2661 bp, Saccharomyces cerevisiae
atggaaggaagatcagattttgtggcgacttcacagtccggaagtgaaatgagccatagtgaaactaggaatagaactgggatgaatgctaggaaaaggaaattcgcctgtgtggaatgtcgtcagcagaagtcgaaatgtgatgctcacgaaagagcaccggagccatgcactaagtgtgctaaaaagaatgtcccatgcattttaaaacgagatttcagaagaacttataaaagagcaaggaacgaagccattgaaaaaagattcaaggaactcaccagaactttgacaaatttaacttcggatgaaattttgaagaaaattgaagaggaacaggaaattgttttggataacagtaatttcacaaaagaaaaagtaaaacaactcaggaagagtgcttttgagacgacagaaatagaaccgagatcatacaaaacacttcgaggagaacctatttcttacagtaccaacagaagacatacggattcttctcctttaacgctcttaagctcgtcgacaaacttcgaccctgttcactcaacaaacgttatgacagatgatcaacttaagtgcttgccaaaaagcctgggcgacgtatatttgtcaagcagcgatattgctgagctgtttcaagaatttgcgacaaaatatcatcaatttttacccgtcgttgacctttcgaaaggagcagagcgaatttatcacttatctccttgcttattctgggtcatcctgctcattggtttaaggcggaaatttggggctacagacttaatgactcgattatcagtgctagtaaagtcagttttatcagaaatcacaatatctccaataattcgatatactccatcagataaggacgaacccgttctaaatgtagcatctgtatattccgtgcaagcatttcttttatacacgttctggcctcccttaacctcttcattaagcgccgacacttcgtggaataccataggaacagcgatgttccaagcgcttcgggtaggactaaattgtgcaggtttttcaaaagagtatgcttcggcaaattcagaattagttaacgagcaaatacgaacttggatttgctgcaatgttgtatctcaaacagttgcatcatcatttggtttcccagcttatgtttcatttgattatttagtaatcagctctattagagtaccaaattcaaaaagccaagtagatatacccaatgaactaagacaaatggctcaaattgctagatttgagaaccaaatcgtaaacacaatgaactccaccccggcgagtgttactgggatggtaagtcaggaagagaagcagcccttgttacacgttcttaatcaacaactaagtcaattggagattagtcttgaagaaaataacctagatgatatccgaaaatttttattactagtggccaaggttcacttattaacctattacttcactgatgttacctcccaaagtgctggaaaatcaaatggtaatatttatgagggatcatattccattatggaactcgatacaagttttgaaacgaaacgtggattggtgaaagtttataatgccgccgtaaactttcttatacatgccaatagtatgtgggaacatgatcctaccattattaagtactttcctggtttgtttgtcttgaatatatggcaatctgcctgtattattagtaaactcatacattcatcacttcattcaatgctagatgttaactcaggcaaaaaagcttataacaacgcaatttcattgacgtttaatgcctcagttttaaaatatgatatggcgtacagatcatccggaataatgcgaagcatatggagtttatttgctaatatgtatgatgcctggaaaaacgaccaaaaggaaggtggaggtagactaaataatgatttcaatttaggcatcaccataaaatctaggatgtcagtaaacgttttttttgactgcttatatattctaaaagagaaatgtggtatggccaaattggagagagagaccaaggtttctacagcttacaatgttgatgaagaggaagaggaagatgaagatgaggagggagaagaagaagaagaagaagaagaactaagtagtaaagttccagaaaatatggatagccagcaactaaggacaaggaaattcaccaatgtaaggcatccagaaaagaaagcaagaaaaataattgaaacaattccgctagacccaaatccaataaatgcaggctctaccagcagtggaagctcattaacgaccccaaatagtcaagtagcgaacactatatcatatagaggaatcctcaataaaatgtcacctagggaacaactgaatcatgcaaatttagattccagtgtttctacagacatcaaggacactgaagctgtcaatgaacctctgccaatagggaggaatgctgaacatccggcaaatcaaccgcctctttcaataacacaaatgcaagaaaacacactacctgcgacacaagccaactcttctctattagaaacgtatcccattgttcaatcaaaccccgttacaactacaatcaaagaatcacccaattccatcatggcaggttgggataactgggaatctgatatggtttggagggatgttgatattttaatgaatgaatttgcgttcaatcccaaggtttaa

SEQ ID NO: 180 - protein, 886 aa, Saccharomyces cerevisiae
MEGRSDFVATSQSGSEMSHSETRNRTGMNARKRKFACVECRQQKSKCDAHERAPEPCTKCAKKNVPCILKRDFRRTYKRARNEAIEKRFKELTRTLTNLTSDEILKKIEEEQEIVLDNSNFTKEKVKQLRKSAFETTEIEPRSYKTLRGEPISYSTNRRHTDSSPLTLLSSSTNFDPVHSTNVMTDDQLKCLPKSLGDVYLSSSDIAELFQEFATKYHQFLPVVDLSKGAERIYHLSPCLFWVILLIGLRRKFGATDLMTRLSVLVKSVLSEITISPIIRYTPSDKDEPVLNVASVYSVQAFLLYTFWPPLTSSLSADTSWNTIGTAMFQALRVGLNCAGFSKEYASANSELVNEQIRTWICCNVVSQTVASSFGFPAYVSFDYLVISSIRVPNSKSQVDIPNELRQMAQIARFENQIVNTMNSTPASVTGMVSQEEKQPLLHVLNQQLSQLEISLEENNLDDIRKFLLLVAKVHLLTYYFTDVTSQSAGKSNGNIYEGSYSIMELDTSFETKRGLVKVYNAAVNFLIHANSMWEHDPTIIKYFPGLFVLNIWQSACIISKLIHSSLHSMLDVNSGKKAYNNAISLTFNASVLKYDMAYRSSGIMRSIWSLFANMYDAWKNDQKEGGGRLNNDFNLGITIKSRMSVNVFFDCLYILKEKCGMAKLERETKVSTAYNVDEEEEEDEDEEGEEEEEEEELSSKVPENMDSQQLRTRKFTNVRHPEKKARKIIETIPLDPNPINAGSTSSGSSLTTPNSQVANTISYRGILNKMSPREQLNHANLDSSVSTDIKDTEAVNEPLPIGRNAEHPANQPPLSITQMQENTLPATQANSSLLETYPIVQSNPVTTTIKESPNSIMAGWDNWESDMVWRDVDILMNEFAFNPKV

SEQ ID NO: 181 - DNA, 1410 bp, Aspergillus terreus
atggctgcagatcaaggtatattcacgaactcggtcactctctcgccagtggagggttcacgcaccggtggaacattaccccgccgtgcattccgacgctcttgtgatcggtgtcatgcacaaaagatcaaatgtactggaaataaggaggttactggccgtgctccctgtcagcgttgccagcaggctggacttcgatgcgtctacagtgagcgatgccccaagcgcaagctacgccaatccagggcagcggatctcgtctctgctgacccagatccctgcttgcacatgtcctcgcctccagtgccctcacagagcttgccgctagacgtatccgagtcgcattcctcaaatacctcccggcaatttcttgatccaccggacagctacgactggtcgtggacctcgattggcactgacgaggctattgacactgactgctgggggctgtcccaatgtgatggaggcttcagctgtcagttagagccaacgctgccggatctaccttcgcccttcgagtctacggttgaaaaagctccgttgccaccggtatcgagcgacattgctcgtgcggccagtgcgcaacgagagcttttcgatgacctgtcggcggtgtcgcaggaactggaagagatccttctggccgtgacggtagaatggccgaagcaggaaatctggacccatcccatcggaatgtttttcaatgcgtcacgacggcttcttactgtcctgcgccaacaagcgcaggccgactgccatcaaggcacactagacgaatgtttacggaccaagaacctctttacggcagtacactgttacatattgaatgtgcggattttgaccgccatatcggagttgctcctgtcgcaaattaggcggacccagaacagccatatgagcccactggaagggagtcgatcccagtcgccgagcagagacgacaccagcagcagcagcggccacagcagtgttgacaccatacccttctttagcgagaacctccctattggtgagctgttctcctatgttgaccccctgacacacgccctattctcggcttgcactacgttacatgttggggtacaattgctgcgtgagaatgagattactctgggagtacactccgcccagggcattgcagcttccatcagcatgagcggggaaccaggcgaggatatagccaggacaggggcgaccaattccgcaagatgcgaggagcagccgaccactccagcggctcgggttttgttcatgttcttgagtgatgaaggggctttccaggaggcaaagtctgctggttcccgaggtcgaaccatcgcagcactgcgacgatgctatgaggatatcttttccctcgcccgcaaacacaaacatggcatgctcagagacctcaacaatattcctccatga

SEQ ID NO: 182 - protein, 469 aa, Aspergillus terreus
MAADQGIFTNSVTLSPVEGSRTGGTLPRRAFRRSCDRCHAQKIKCTGNKEVTGRAPCQRCQQAGLRCVYSERCPKRKLRQSRAADLVSADPDPCLHMSSPPVPSQSLPLDVSESHSSNTSRQFLDPPDSYDWSWTSIGTDEAIDTDCWGLSQCDGGFSCQLEPTLPDLPSPFESTVEKAPLPPVSSDIARAASAQRELFDDLSAVSQELEEILLAVTVEWPKQEIWTHPIGMFFNASRRLLTVLRQQAQADCHQGTLDECLRTKNLFTAVHCYILNVRILTAISELLLSQIRRTQNSHMSPLEGSRSQSPSRDDTSSSSGHSSVDTIPFFSENLPIGELFSYVDPLTHALFSACTTLHVGVQLLRENEITLGVHSAQGIAASISMSGEPGEDIARTGATNSARCEEQPTTPAARVLFMFLSDEGAFQEAKSAGSRGRTIAALRRCYEDIFSLARKHKHGMLRDLNNIPP

SEQ ID NO: 183 - DNA, 2373 bp, Saccharomyces cerevisiae
atgttcgaatctgtcaatttggatgaaaattctccagaggatagagaactggctaaggttttgtccccaccgggtagttatctttctccagcttcactagacagtggttcatcgttcacaaatagtgggacttcaactagttgctttgaaccaaaaaacaatctaccctccttatcgtttttaaatgctagagcgggatctttaggtggcatttttaatcataaacagatgacctcgccgtcaaattcgaatataggaggcgaaaatgtagaatcgaccacaagtagtaatgacggcagtaatgaaaatgcaggtcatcccactacttcagagcaagatcaaaatgcagatcaccccactatttcacaggcagatgataatggacactcatcgttgacccctaatcctgctgtaacttcaactgttacggataagaagggaaatacagtaaaacggaagtactccagaaatgggtgctccgagtgtaagagacgaagaatgaaatgtgatgaaactaaaccgacttgttggcagtgcgcaagattgaatcgtcagtgcgtttacgttttaaacccaaaaaataagaaaagaagaacctcaaatgctcaaagagtaaaagaatttaggaagcacagtactagcctcgataatgatcataataatgctcgcaagcgtcagcattcgtcatgcaaggctgagaagaagaaaaaagtacgacaaaatttaagtgaagacaccacggaccctaaaccgattacagataacggcaagaatgtacctttggatgaaatagaatccctagagattccaaatttggaccttaccaccacaatgaatggatatgacgttaatttactaatgcagaacttgaatgatatggttaatatgaaacttcatgactcttacttattgaatgaagaactgaaaggattagatttgcccgatttggacatacctgaacttttgcccgcttcgaatgtgaacagtagcgtaccaatatcctttctggtgaataatgtaataactttcaacacaaaactaagctcgttcaaactaggtggaatccacgataagtatctaaagatattttactacgattgcttagattctattgcgccctttttccaaaatcaagggaacccgttaagagatatcttactttcatttgcgaaaaacgaggcctatcttttatcttccatattagctacgggagcatctatagcatatagaaagtctaataacttggaagatgaacgaaactattgtgcttatttgtcacattgcctgagcctgttgggtgaacaattcaagaatgagtcaaacgttttaaataggatagagcctatcatcctgacggtcatcatgcttgcatgggattgtatttattcaatgaattctcaatggaggtctcacttaaaaggtgtaactgacctttttaaaaaaatcaatgccgggaattcctccaaagtacttaacgttgcaaaatgttggtttaaagttatggaaacattcgccagtataagtacggtatttggcggatctttaattgataataatgaccttgatgcaatttttgatccatatgattaccaatatgttgactcgttaaaatttttaaatattatgactccactaaatgagtttaatcttttaagaggacataaagaagatttcgatcttgttattaaagaagttttcaaatcactcaatacaattaggtcaactgaaaaaaattacttttctaaagaagaaggtttgttcactaagaaattagactatctgcttttatcatcccaaacttcgtccgaaaagtccaaagaccagatatcatatttcaatacgcagaaaattctagtggaaattgacaagcaattagattacgaatttattgacaaatctggaattataccctcagacaatcagtcacaccctagaattagtaatattcatgataatgccatcgatatggtgacattaaagaacggtgaagaagttgccatcagctggtatgatatttctcatcagacacaagttttatctttcttattaattgtattattaaaacttttaggtatgccaaaagagtcaagtaccattcaacaagtggtcaagaaaatcatgtctttcttcaaattcttagacagtgactcgccgccacaaaattcaaggacttgttatagtaattttgctgtattgattgcaggtttgaatgcaatggacgaggaaacaagagcgattgttaaaagatattataaaatcaatggtggaaaatttcaaaagctcacagaacataatcttaacagactggaaaaggtctggtatggtaaaaatcaaaattacaggttagaagaacaagacgttttaacatggtag

SEQ ID NO: 184 - protein, 790 aa, Saccharomyces cerevisiae
MFESVNLDENSPEDRELAKVLSPPGSYLSPASLDSGSSFTNSGTSTSCFEPKNNLPSLSFLNARAGSLGGIFNHKQMTSPSNSNIGGENVESTTSSNDGSNENAGHPTTSEQDQNADHPTISQADDNGHSSLTPNPAVTSTVTDKKGNTVKRKYSRNGCSECKRRRMKCDETKPTCWQCARLNRQCVYVLNPKNKKRRTSNAQRVKEFRKHSTSLDNDHNNARKRQHSSCKAEKKKKVRQNLSEDTTDPKPITDNGKNVPLDEIESLEIPNLDLTTTMNGYDVNLLMQNLNDMVNMKLHDSYLLNEELKGLDLPDLDIPELLPASNVNSSVPISFLVNNVITFNTKLSSFKLGGIHDKYLKIFYYDCLDSIAPFFQNQGNPLRDILLSFAKNEAYLLSSILATGASIAYRKSNNLEDERNYCAYLSHCLSLLGEQFKNESNVLNRIEPIILTVIMLAWDCIYSMNSQWRSHLKGVTDLFKKINAGNSSKVLNVAKCWFKVMETFASISTVFGGSLIDNNDLDAIFDPYDYQYVDSLKFLNIMTPLNEFNLLRGHKEDFDLVIKEVFKSLNTIRSTEKNYFSKEEGLFTKKLDYLLLSSQTSSEKSKDQISYFNTQKILVEIDKQLDYEFIDKSGIIPSDNQSHPRISNIHDNAIDMVTLKNGEEVAISWYDISHQTQVLSFLLIVLLKLLGMPKESSTIQQVVKKIMSFFKFLDSDSPPQNSRTCYSNFAVLIAGLNAMDEETRAIVKRYYKINGGKFQKLTEHNLNRLEKVWYGKNQNYRLEEQDVLTW

SEQ ID NO: 185 - DNA, 1254 bp, Saccharomyces cerevisiae
atgataatatttaatgggaacaaatatgcgtgtgcatcgtgcatcagagggcatcgctcttcaacatgcaggcattctcaccgaatgctaattaaggtgagaactagaggaagaccttcacccatggctatcagagacgctattttagtagactctacatcgcaaagtacagaatacgaaaatggtgcacaaattgaaggtgactgctgcagcgcaatgaatcaacagccaatactgtttgtacgtgcctctgctgttagaaaggcaagaatgataaacggaaaattgcatatattaatggaggaaggtttcactgctcatgagcctaaagatattagcacatttaccgatgatggtaacaaatatatcaccgaaacggagtttcttaggaaacactctcccaaagctccggcaacaggaacaatatctccggactctaccaagtcatcttcttcaagtgagaagaaagagcgaagccggcttcaacaggagcctatacgacatttttcaaactgctgtaagaaagataaatcacagaacccagcttctaatggcaagacgaacaaggcaccgtctgatgacatatttacgccatacggctccttggaatctacgtccgcttttaacgatattttacaagaaaactacaatagttctgttcctggtgcgcatgacagttcagaaacactcaccccacaaagtacaacaacgattgctgctcctcattcaagcgacgttgcttcgaaagttgaagtcctgactcataagggcatttttttaagcacgcagtgctcttgtgaagatgaaagctgcccatgtgttaattgtctaatccatagaagcgaagaggaactgaattcttatattcaacaaagtggtgttcctttaaccaatattggtgaagctcaaattactgataagatgatggattatttggatgattgtaaatgcactgacaaggaatgcatatgtcctccggataactgcacttgtgatggatgtttttctcactctacaaatataattccatttgaaaaattctttttctatggaattctgaatgcaagattaacaaggaaaactcaaataaaattcaaaggtaaattggtgccgtcaaaatattggtgggattttttgaagttgcaagtgccattgatgacagatgctcagttagaattacttgacattcatgcgtggtttcaaaaattagtctctaattatgcaccacatctaagcgatgccaccacttcataa

SEQ ID NO: 186 - protein, 417 aa, Saccharomyces cerevisiae
MIIFNGNKYACASCIRGHRSSTCRHSHRMLIKVRTRGRPSPMAIRDAILVDSTSQSTEYENGAQIEGDCCSAMNQQPILFVRASAVRKARMINGKLHILMEEGFTAHEPKDISTFTDDGNKYITETEFLRKHSPKAPATGTISPDSTKSSSSSEKKERSRLQQEPIRHFSNCCKKDKSQNPASNGKTNKAPSDDIFTPYGSLESTSAFNDILQENYNSSVPGAHDSSETLTPQSTTTIAAPHSSDVASKVEVLTHKGIFLSTQCSCEDESCPCVNCLIHRSEEELNSYIQQSGVPLTNIGEAQITDKMMDYLDDCKCTDKECICPPDNCTCDGCFSHSTNIIPFEKFFFYGILNARLTRKTQIKFKGKLVPSKYWWDFLKLQVPLMTDAQLELLDIHAWFQKLVSNYAPHLSDATTS

SEQ ID NO: 187 - DNA, 861 bp, Saccharomyces cerevisiae
atgtcagacatcgaagaaggtacgcctactaataatgggcaacagaaggagagaagaaagatagaaattaagttcatcgagaataaaacaaggcgccatgtgacattttccaaaaggaagcacggtatcatgaaaaaggcgtttgagctttctgttctaacggggacccaggtcctgttgctagtcgtttcagaaacaggtttggtatatactttcagcacgccgaagtttgaacctatagtcacgcagcaggaaggtagaaacctgatccaggcctgtcttaacgcccctgatgatgaggaagaagacgaggaggaagacggtgatgatgatgatgatgatgacgatgatggtaatgatatgcaacgccagcaaccacaacaacagcaaccgcaacaacagcaacaagtattgaatgcacacgcaaatagcttaggccatctaaatcaagatcaggtaccggcaggcgcgctgaaacaagaggtgaagtcacaattgctaggcggtgccaatcctaatcaaaactcaatgattcaacagcagcaacatcacacgcagaattcacaaccacaacagcaacagcaacaacaaccacagcagcaaatgtcacagcaacaaatgtcacagcatcctcgaccacagcaaggaataccacatccgcaacaatcgcagccacagcaacagcaacaacaacaacaacaactgcaacagcagcaacagcagcaacaacaacaacccctcaccggcattcatcagcctcaccaacaggcttttgccaacgctgcctccccctatctgaatgctgaacagaatgctgcctaccaacaatactttcaagaaccgcaacaaggccaatactaa

SEQ ID NO: 188 - protein, 286 aa, Saccharomyces cerevisiae
MSDIEEGTPTNNGQQKERRKIEIKFIENKTRRHVTFSKRKHGIMKKAFELSVLTGTQVLLLVVSETGLVYTFSTPKFEPIVTQQEGRNLIQACLNAPDDEEEDEEEDGDDDDDDDDDGNDMQRQQPQQQQPQQQQQVLNAHANSLGHLNQDQVPAGALKQEVKSQLLGGANPNQNSMIQQQQHHTQNSQPQQQQQQQPQQQMSQQQMSQHPRPQQGIPHPQQSQPQQQQQQQQQLQQQQQQQQQQPLTGIHQPHQQAFANAASPYLNAEQNAAYQQYFQEPQQGQY

SEQ ID NO: 189 - DNA, 1695 bp, Candida albicans
atgcattacagatttttaagagatagttttgttggtagagtgacttatcatttatcgaaacataaatactttgcccatccagaagaagctaaaaattatattatccccgagaaatatttagccgattacaaaccaactcttgctgatgatacaagtataaattttgaaaaagaagaaatagataatcaaggtgaacccaattcaagtcaatcatcatcttccaataacacaatagtcgacaacaacaacaataataataatgatgttgatggagataaaatagttgtcacttgggatggtgatgatgatcccgaaaaccctcaaaattggccaactttacaaaaagcatttttcattttccaaatttcatttttgacaacttcagtttatatgggatcagcagtatatacccctggtattgaagaattaatgcatgattttggtattggaagagtcgtagctacattgccattaacattatttgttattggttatggtgttggcccattggttttcagtcccatgtcagaaaatgctatatttggtcgtacatccatatatatcataacattatttttatttgtcatactacaaatccccactgctttggtaaataatattgccggtttatgtatattgagattcttgggtggattcttcgccagtccttgtttggccactggtggcgcaagtgttgctgatgtggttaaattttggaatttaccagttgggttagccgcttggagtttaggtgctgtttgtggtcctagttttggtccattctttggttcaattttaactgtcaaagccagttggagatggactttttggttcatgtgtatcatttctgggttttcatttgttatgttgtgtttcactttacctgaaacttttggcaaaacattattgtatcgcaaggctaaaagattgagagccatcaccggtaacgacagaatcacaagtgaaggagaaattgaaaatagcaaaatgacaagtcatgaattgatcattgatacattatggagaccattagaaatcaccgttatggaaccagttgttcttttgattaacatttacattgccatggtgtacagtattctttacttgtttttcgaagttttcccaatttatttcgttggagttaaacatttcaccctcgttgaattgggtaccacatatatgtcgattgttattggtattgtcattgctgcctttatttatattccagttattagacaaaaattcaccaaaccaatattacgtcaagaacaagttttccccgaagtatttattccaattgccattgttggtggtatcttgttaacttcaggtcttttcatttttggttggtcagcaaatagaaccactcattgggttggtccattgtttggtgctgccactactgcttctggtgcatttttgattttccaaacattattcaatttcatgggtgcttcatttaagcctcactatattgcttcagtttttgcatcaaatgatttgttcagatcagtcattgcatcagtgttcccattatttggtgctcctttgtttgacaatttggccacccctgaatatccagttgcttggggtagttccgtgttgggtttcatcacccttgttatgattgctattccagttttgttttacttgaacggaccaaagttgagagcaagatctaagtatgctaattag

SEQ ID NO: 190 - protein, 564 aa, Candida albicans
MHYRFLRDSFVGRVTYHLSKHKYFAHPEEAKNYIIPEKYLADYKPTLADDTSINFEKEEIDNQGEPNSSQSSSSNNTIVDNNNNNNNDVDGDKIVVTWDGDDDPENPQNWPTLQKAFFIFQISFLTTSVYMGSAVYTPGIEELMHDFGIGRVVATLPLTLFVIGYGVGPLVFSPMSENAIFGRTSIYIITLFLFVILQIPTALVNNIAGLCILRFLGGFFASPCLATGGASVADVVKFWNLPVGLAAWSLGAVCGPSFGPFFGSILTVKASWRWTFWFMCIISGFSFVMLCFTLPETFGKTLLYRKAKRLRAITGNDRITSEGEIENSKMTSHELIIDTLWRPLEITVMEPVVLLINIYIAMVYSILYLFFEVFPIYFVGVKHFTLVELGTTYMSIVIGIVIAAFIYIPVIRQKFTKPILRQEQVFPEVFIPIAIVGGILLTSGLFIFGWSANRTTHWVGPLFGAATTASGAFLIFQTLFNFMGASFKPHYIASVFASNDLFRSVIASVFPLFGAPLFDNLATPEYPVAWGSSVLGFITLVMIAIPVLFYLNGPKLRARSKYAN

SEQ ID NO: 191 - DNA, 1479 bp, Saccharomyces cerevisiae
atggagagtcgaactacagggcctttaacgactgaaacctacgatggccccactgtggccttcatgatattaggtgccgccctagtattttttatggtgcccggattgggattcttgtactccggattggcaagaaggaagtctgcactagcactaatctgggttgtattaatggcgactttggtcggtatactgcaatggtatttctggggttactctctagctttttcaaagtccgctccgaataataaattcattgggaatctagattcgtttggctttagaaacgtgtacggaaaaaaattcgatgaagatgcctaccctgagctcgcgtatgcaaccttccaaatgatgttttcgtgcgtcaacttaagtattatcgctggcgccactgccgaaagaggcaggctgctaccgcacatggtttttctctttattctagctaccattggatattgtccagtgacgtattggatttggtcaccaggtggttgggcataccaatggggagtcctcgattgggcaggcggcggcaacattgaaatattaagcgctgtttccgggtttgtttactcttggtttttgggcaaaagaaatgaaaagttactgataaatttcaggcctcataatgtttcattggtcactctaggcacatccatactgtggtttggctggctgctatttaattctgcatcctcattatccccaaatttgaggtcagtttatgcattcatgaatacatgtctcagtgccattactggtgggatgacgtggtgtcttctggattacagatcggagaagaaatggtcgacagttggtctgtgctccggtatcatttctgggctggtggctgcaacgccaagctcaggctgtataaccctttacggttcacttattcaaggcattgtggcgggggtagtgtgtaactttgcgacgaagttgaaatactacgctaaagtagatgatgccatggacattctagctgagcacggggttgcaggcgtaataggactaattttcaatgccctttttggagcagactgggtcattggtatggatggcactacagagcacgagggcggctgggtaactcacaattacaagcaaatgtataagcagatcgcttacattgccgcatccattgggtacactgctgctgtaactgcaataatctgctttgtgctcggctacatacccggtatgaggctaagaatatcagaagaggcagaggaggcgggtatggacgaagatcaaattggcgaatttgcgtacgattatgtggaagtgagaagagattactatctatggggtgtagacgaagattcacaacgctctgatgtaaatcaccgggtgaacaacgctcatttggccgctgaacgtagcagtagcggtactaatagttcctcggatgggaatggagaaatgattcaatccgaaaagatcctaccaattcatcaagaagatcctgccaataggtaa

SEQ ID NO: 192 - protein, 492 aa, Saccharomyces cerevisiae
MESRTTGPLTTETYDGPTVAFMILGAALVFFMVPGLGFLYSGLARRKSALALIWVVLMATLVGILQWYFWGYSLAFSKSAPNNKFIGNLDSFGFRNVYGKKFDEDAYPELAYATFQMMFSCVNLSIIAGATAERGRLLPHMVFLFILATIGYCPVTYWIWSPGGWAYQWGVLDWAGGGNIEILSAVSGFVYSWFLGKRNEKLLINFRPHNVSLVTLGTSILWFGWLLFNSASSLSPNLRSVYAFMNTCLSAITGGMTWCLLDYRSEKKWSTVGLCSGIISGLVAATPSSGCITLYGSLIQGIVAGVVCNFATKLKYYAKVDDAMDILAEHGVAGVIGLIFNALFGADWVIGMDGTTEHEGGWVTHNYKQMYKQIAYIAASIGYTAAVTAIICFVLGYIPGMRLRISEEAEEAGMDEDQIGEFAYDYVEVRRDYYLWGVDEDSQRSDVNHRVNNAHLAAERSSSGTNSSSDGNGEMIQSEKILPIHQEDPANR

SEQ ID NO: 193 - DNA, 1500 bp, Saccharomyces cerevisiae
atgtcttacaattttacaggtacgcctacaggcgaaggaacgggtggtaactcgttgacaacagatttgaatacacaatttgacttggccaacatgggatggatcggtgtggcttcagcaggtgtgtggattatggtcccaggtatcggtttattatattctggtttatccaggaaaaagcatgctttatccttgctttgggcctcgatgatggcttccgccgtgtgtattttccaatggtttttctggggatactcattagctttctcacacaacactagaggtaacggttttattggtaccttggaattctttgggtttcgtaacgttttaggagccccatctagtgtcagttctcttcccgatatactgtttgccgtttaccaaggtatgtttgccgcagtcaccggtgccctaatgctaggtggtgcctgcgagagggcaaggttgtttcctatgatggtgttcttgtttttatggatgactattgtttattgtcctattgcatgctgggtctggaatgccgagggttggttggtcaaattgggtagcttggactatgcaggtggtttatgtgtccatttaacatctggacatggtggtctagtttacgctttgatactgggtaagcgtaatgaccctgttacacgtaaagggatgcccaagtacaaaccacattccgtcacctcggtggttttaggcacagtgttcttatggtttggttggatgttctttaacggaggctctgcaggtaatgcaactatacgagcatggtactctattatgtccacaaacttagctgctgcttgcggtggcttgacatggatggttatcgattatttcagatgcggaagaaagtggactacagttggtttgtgttcaggtatcatcgctggcctagtgggtatcaccccagccgccgggttcgtgccaatctggtcagccgttgtcattggtgtggttactggtgcaggatgtaaccttgctgttgacttaaagagtctattgcgcatcgatgatggtctagattgttactctatccatggtgtgggtggttgtattggttctgtattaactggtatctttgctgcagactatgtaaatgccactgcaggctcttacattagtccaattgatggtggctggatcaatcatcactataaacaagttggttatcaattagcaggtatatgcgctgcactagcctggactgttactgtcacatctatcttgcttctaactatgaatgccattccatttttaaaactaagattaagtgctgatgaggaagaattaggtaccgacgctgctcaaattggtgaatttacatacgaggaatccactgcttacatcccagaaccaatcagatctaaaacatcggcacaaatgccacctcctcatgaaaacattgatgataagattgtgggtaacacagacgcagaaaagaattctacgccttccgacgcttcttctactaagaacactgaccatatagtataa

SEQ ID NO: 194 - protein, 499 aa, Saccharomyces cerevisiae
MSYNFTGTPTGEGTGGNSLTTDLNTQFDLANMGWIGVASAGVWIMVPGIGLLYSGLSRKKHALSLLWASMMASAVCIFQWFFWGYSLAFSHNTRGNGFIGTLEFFGFRNVLGAPSSVSSLPDILFAVYQGMFAAVTGALMLGGACERARLFPMMVFLFLWMTIVYCPIACWVWNAEGWLVKLGSLDYAGGLCVHLTSGHGGLVYALILGKRNDPVTRKGMPKYKPHSVTSVVLGTVFLWFGWMFFNGGSAGNATIRAWYSIMSTNLAAACGGLTWMVIDYFRCGRKWTTVGLCSGIIAGLVGITPAAGFVPIWSAVVIGVVTGAGCNLAVDLKSLLRIDDGLDCYSIHGVGGCIGSVLTGIFAADYVNATAGSYISPIDGGWINHHYKQVGYQLAGICAALAWTVTVTSILLLTMNAIPFLKLRLSADEEELGTDAAQIGEFTYEESTAYIPEPIRSKTSAQMPPPHENIDDKIVGNTDAEKNSTPSDASSTKNTDHIV

SEQ ID NO: 195 - DNA, 564 bp, Saccharomyces cerevisiae
atgagtgcgaaacaagggtgggaaaagaaatcaacaaacattgacattgcaagcaggaagggtatgaacgtgaacaatctttcggaacatctacagaacctgatatcaagcgattcagagctgggctcgcgcttgctatcattgctgctggttagcagtggcaacgcggaggagctcattagcatgataaataatggccaggatgtctcgcagtttaagaagctccgcgagccgagaaaggggaaggttgccgcaacaacagcagttgttgtaaaagaagaggaagctcccgtgagcacttctaacgaactggataagattaagcaagagcggagaagaaagaacacagaggcgtcgcagcggttccgcattcgcaagaaacaaaagaattttgagaacatgaataagctgcagaacttaaacacgcaaatcaacaaacttcgcgatcgtatagagcaattgaacaaggaaaatgagttttggaaagcaaagctcaatgacattaacgagattaagtctttgaaattgttgaatgacattaagagacggaacatgggcaggtag

SEQ ID NO: 196 - protein, 187 aa, Saccharomyces cerevisiae
MSAKQGWEKKSTNIDIASRKGMNVNNLSEHLQNLISSDSELGSRLLSLLLVSSGNAEELISMINNGQDVSQFKKLREPRKGKVAATTAVVVKEEEAPVSTSNELDKIKQERRRKNTEASQRFRIRKKQKNFENMNKLQNLNTQINKLRDRIEQLNKENEFWKAKLNDINEIKSLKLLNDIKRRNMGR

SEQ ID NO: 197 - DNA, 534 bp, Saccharomyces cerevisiae
atgaaactggcgcaagacatgaatgtagatgaaatatttctcaaacaagcggcagaagctatagcggtaatctcatcaagtcccactcatacggaccccataatacgagagctactccacagaattcgacaatccagcccattgagcgcagttataccagcaccagaaaatgttttaaaggctggggagccggaaaatatggctagaggtcttataaggattccagaaacacaaacaaaaagaacaggaggtaacaaccatagcaaggaaggcgcacagctctacagctgtgcgaaatgtcagttgaaattcagcagaagttctgatctgagaagacatgaaaaggtacactcactcgtgctgccgcatatttgctcaaactgtggcaaagggtttgccaggaaggatgctctaaaaagacattctaacacactgacctgtcaaagaaacagaaagaaactaagtgaaggttcagacgttgatgtagatgagctcatcaaggatgcgataaagaatggtaccggcctgttgtaa

SEQ ID NO: 198 - protein, 177 aa, Saccharomyces cerevisiae
MKLAQDMNVDEIFLKQAAEAIAVISSSPTHTDPIIRELLHRIRQSSPLSAVIPAPENVLKAGEPENMARGLIRIPETQTKRTGGNNHSKEGAQLYSCAKCQLKFSRSSDLRRHEKVHSLVLPHICSNCGKGFARKDALKRHSNTLTCQRNRKKLSEGSDVDVDELIKDAIKNGTGLL

SEQ ID NO: 199 - DNA, 2019 bp, Saccharomyces cerevisiae
atgaagcaggagcagtcccacgaaggcgactcatacagcacggaattcataaatctctttggcaaagataccgcaacacaccctagcagcaacaacggtgctaataataatggcatggggagcacgaactcgttggaccagtttgtggcaacagcctcatcgtcatcttctctggtgaccagcagcgagaataggcgccccctaataggtgacgttaccaataggggcaacactaacctatatgaccacgctgtcacgccagaaatactcttagaacagttggcctacgtggataacttcataccatctctggataacgagttctctaatgtggattggaatgtgaataccacccataataatgcaaacaataatggcgcggacactttcagcagcataaatgcaaatccttttgacttggatgaacaactagccattgagttgagtgcgtttgccgacgattctttcatcttcccagacgaggataagccgagcaataacaataacaacagcaataatggtaatgacgaccatagcaaccacgacgtattgcatgaggacccttctaccaataatagacaaagaaatcctcacttcttgactcaaagaaggaatactttcctaacttcccaatacgaccaatcaaagtctcgattttcgtccaaaaacaaaagaaatggcaataacggcgaaacaaacaactttggcgacaatatgcaaaataaccatccttttgagccaaactttatgggaagcccttctcagtttcccgctgacgcaactaatatgacatcaatcgaccatggcggcttcacaaatgttgacattacatcaactgagaacaatactaccggtgacaatggagtggatgcgctatcaaatctactacataggacaacacacacaccgaaccgctcctcccccctaagcaatgtcacttctgctcaaaattcctcttcacaacaacgaaaacattcggaaagcaaagtcgatagtaacagcgataataacagctccaacaaagcccccaatataactgttcctgactattcaattataccaacctctgttttagtaactctattaccgagggtcaacgtgcccaacggcgcatataactcgttgatcagcgcgggatttgacaatgatcaaatagatgctatagccgcaataatggcgtatcatcatcaaaaaaagattagggaaaataacagtaataataataaaaacatcaacaccaatgacagtcaagaggcacccattctaaaaaacatcaacgaacttttaagtgtcttaataccaccctctccggctgaaactcgtgggccaactaccttatcaacgtcgccttcgttcaatgagcacggtgtagtagcagaggcttcttttctaagctccattttggaactgggcataaagcatccaaaaagtaataatattcacaatcaacgacaaccttcacgaaacgatcataaaatatcaagagagagtgacggtaacaatggaaacgataatgtccatcataataacgctgttattaagtcaagtacgacgcgtggagacgaaattgccaagatacgatccgagccaactttaaatgcaagttcttctgatcacaaggaaaatagtttaaaaagatcacactccggagatttgaaaaataaaaaagtacccgtcgaccgcaagtattctgataatgaagacgatgaatatgacgatgcagatttacacggctttgaaaagaagcaactgatcaagaaagagttaggggacgacgatgaagatttattgatacagtcgaaaaaatctcatcaaaaaaaaaaactaaaggaaaaggagttagaatcatcgatacatgaactgaccgaaattgcagcatccttacaaaaacggatacatacgttagaaacggaaaacaagcttttaaagaatttagttctgagtagcggtgaaacggaaggaataaaaaaagctgaaagcttaaagaagcaaatttttgagaaggttcagaaagaataa

SEQ ID NO: 200 - protein, 672 aa, Saccharomyces cerevisiae
MKQEQSHEGDSYSTEFINLFGKDTATHPSSNNGANNNGMGSTNSLDQFVATASSSSSLVTSSENRRPLIGDVTNRGNTNLYDHAVTPEILLEQLAYVDNFIPSLDNEFSNVDWNVNTTHNNANNNGADTFSSINANPFDLDEQLAIELSAFADDSFIFPDEDKPSNNNNNSNNGNDDHSNHDVLHEDPSTNNRQRNPHFLTQRRNTFLTSQYDQSKSRFSSKNKRNGNNGETNNFGDNMQNNHPFEPNFMGSPSQFPADATNMTSIDHGGFTNVDITSTENNTTGDNGVDALSNLLHRTTHTPNRSSPLSNVTSAQNSSSQQRKHSESKVDSNSDNNSSNKAPNITVPDYSIIPTSVLVTLLPRVNVPNGAYNSLISAGFDNDQIDAIAAIMAYHHQKKIRENNSNNNKNINTNDSQEAPILKNINELLSVLIPPSPAETRGPTTLSTSPSFNEHGVVAEASFLSSILELGIKHPKSNNIHNQRQPSRNDHKISRESDGNNGNDNVHHNNAVIKSSTTRGDEIAKIRSEPTLNASSSDHKENSLKRSHSGDLKNKKVPVDRKYSDNEDDEYDDADLHGFEKKQLIKKELGDDDEDLLIQSKKSHQKKKLKEKELESSIHELTEIAASLQKRIHTLETENKLLKNLVLSSGETEGIKKAESLKKQIFEKVQKE

SEQ ID NO: 201 - DNA, 885 bp, Aspergillus nidulans
atggctgaatacaatggccgccgtgcgcccaacttctcgcaatatctggacgatttgaatgccattccttcgccctacgatgtcgcgatgcagcagcagcaacagcaggatgggttcaatatcgataacgacctatcgctgttcactaataccgagtttttcgacttcgatctgaacctcccgccattcgaacccgtcgaggagaacaagcacaacgttaaccaaaactccgatatggatttcttggatatactgggtggtgaagggtttggcaatgtcaacgactatgcccctcagatgaattcgataaacaaccaatctgtacccgtgcagaatgctcagttccatgccgtgccgcagtcgcaggttcccgggttgcctaacgttagcgcccaagtgaaccagtccgtcaattcccgggcaaccgcctccccttctcagtcttctgtcgctgccccgagtcccacgaacgctacctccctcgcagctcctgctccaggccctaagcgcaagcacacgcagaagactgtcccagttagcgtggaggaggctgcacgaattgctgctgatgaggacaagcgccgccgcaacaccgccgccagcgcccgcttccgagtcaaaaagaagatgcgcgagcaagctctggaaaagaccgtcaaggatactaccgaaaagaacgccgcgctggaagcccgtgtcaccgccctcgagctcgagaatcaatggctcaagaacctgattaccgagaagaacggcaagtccgcggaagaaggaaaaaaggcggagaacgacatctcggacatgttcaagaagtttcttgctgcacagaagaccgagggcgagcgaagtaacggcaactccaaaatcggcgttggtaccgtttag

SEQ ID NO: 202 - protein, 294 aa, Aspergillus nidulans
MAEYNGRRAPNFSQYLDDLNAIPSPYDVAMQQQQQQDGFNIDNDLSLFTNTEFFDFDLNLPPFEPVEENKHNVNQNSDMDFLDILGGEGFGNVNDYAPQMNSINNQSVPVQNAQFHAVPQSQVPGLPNVSAQVNQSVNSRATASPSQSSVAAPSPTNATSLAAPAPGPKRKHTQKTVPVSVEEAARIAADEDKRRRNTAASARFRVKKKMREQALEKTVKDTTEKNAALEARVTALELENQWLKNLITEKNGKSAEEGKKAENDISDMFKKFLAAQKTEGERSNGNSKIGVGTV

SEQ ID NO: 203 - DNA, 1371 bp, Saccharomyces cerevisiae
atgcaacctaaaactttcgtccaccaacttcatgcaattcttctggaaccggaagtaaataaatggatatactggtctccgactgataacacggtattttttttgaagccatatgaccctaattttagtacacatgttctgaagcgttatttcaaacatggaaatgtcaatagttttgttcgtcaactacacatgtacgggtttcataaactatctcatccttccccagaccaatcttctgccaacaatggtaacgttaaagaacttgttgaatggaaatttacccacccatctggattcttcttcaaagaggccaacgccggtatcttgaataaaatccaaagaaagagcactggtgtgggaaaagatggtaaaagaaagaatatactgtcaccaatatctgtcagttacgttgatgcttcgaggttaaatgttctctctcagcaatccggaccagtttctgcaagagaaccatcaaacatgtttatgggcagtcccgtccattactcaacatcccaaagtcctccacatatcagtataccgcaacagcaacaaagtagtggaccttacctaatatcttcactgccccctcaacaacccacggtgaacatgatgcgaaggcaaagcatctcggcgaggatgatgaattcttatgactatcccaatcaattttccacccaagatagcatagtccagcctcagcagccgcaacaagtactttctccacaagcattatctggacctccgatgaagaaatcaggaacactatcttcgacagatgatctgaaaacaacttccttgccaattgttaattacccaatgccgtatcatcctggagcttttgcccagcagcagcagcagcagcagcaaccgctccctacagtcccgccatatagcagttactccactccatttccctcaatgatgaactctctttcgaactctgcttctaactcacctgctttaggagtttgtaataataatgtaacactacccaaaaaaagcaatataagtgaaaggcaagctttggataaccatatacaaactttaaagaactctctatcaacaatcactgatttgatagaaaaacatattaacagcgcatcgcaagatgaaaataaaactctaactaatgatgccatgaacaaagaccttcgaacaagcttatccctattacagaattccaaggaggaaatcattcaacttgaaagtaaatggatgtctatgcaatctgttaaaacaactgccctaccccttcaagagactacgaatacatcatcgaccttaacttctctgacgtccagcataattcccaagagtatacctataatcacgaaaggtgaagtcgccactaaaccagcatcttactga

SEQ ID NO: 204 - protein, 456 aa, Saccharomyces cerevisiae
MQPKTFVHQLHAILLEPEVNKWIYWSPTDNTVFFLKPYDPNFSTHVLKRYFKHGNVNSFVRQLHMYGFHKLSHPSPDQSSANNGNVKELVEWKFTHPSGFFFKEANAGILNKIQRKSTGVGKDGKRKNILSPISVSYVDASRLNVLSQQSGPVSAREPSNMFMGSPVHYSTSQSPPHISIPQQQQSSGPYLISSLPPQQPTVNMMRRQSISARMMNSYDYPNQFSTQDSIVQPQQPQQVLSPQALSGPPMKKSGTLSSTDDLKTTSLPIVNYPMPYHPGAFAQQQQQQQQPLPTVPPYSSYSTPFPSMMNSLSNSASNSPALGVCNNNVTLPKKSNISERQALDNHIQTLKNSLSTITDLIEKHINSASQDENKTLTNDAMNKDLRTSLSLLQNSKEEIIQLESKWMSMQSVKTTALPLQETTNTSSTLTSLTSSIIPKSIPIITKGEVATKPASY

SEQ ID NO: 205 - DNA, 1131 bp, Saccharomyces cerevisiae
atgttgtctttcacaaccaagaatagtttccgcttattacttttaatactgtcatgcatatcgacgatacgcgcacaatttttcgtgcaatcatcatcttcgaattcttcagcagtatctactgcacgttcttccgtaagtagagttagttcttcaagttccattttgtcatccagtatggtttcttcctcaagtgctgactcatcttcccttacttcatcgacatcaagtaggtccctcgtgtcacatacgagttcgtctaccagcattgcctccatatcgttcacatcattcagtttctcatcagattcaagcaccagcagctcttcctctgcttcttcagattcttcatcctcctcatccttttccatctcttcgacatccgcaacttctgaatcatcgacgtcttctacgcaaacgtcaacatcatcttcatcctcactgtcgtcaacgccgtcctcttcatcatccccatcaacaatcacttctgcaccttcaacctcctccacaccatccactactgcctataatcaaggaagcactatcaccagtattattaacggtaagacgattctctcaaatcattatactaccgttacgtacacaccatcagcaaccgctgattcaagcaataaatccaaaagttcgggtctttctaaaaaaaatagaaacatcgtcattggttgtgtggttggtattggtgtaccactgattctggtgatactggctttaatttacatgttttgtatccaatcatcaaggacggactttattgactcagatggtaaggtcgttacggcatatagagctaacaaatttacgaaatggtggtatatgcttttgggtaagaaagttagtgatgaataccactccgattcaccattaggtggtagtgcatcgtccgcaggtggtttagacctagatgaagcagatgatgtgatggagcaaagctcccttttcgacgtcagaataagagatagcgatagcgtattaccaaacgccaacaccgccgaccataataataccaatagcggtggagagcctataaatagtagcgttgcgtcaaatgacataatagaagaaaaattctatgatgaacaaggtaacgaattatcaccacgaaattattaa

SEQ ID NO: 206 - protein, 376 aa, Saccharomyces cerevisiae
MLSFTTKNSFRLLLLILSCISTIRAQFFVQSSSSNSSAVSTARSSVSRVSSSSSILSSSMVSSSSADSSSLTSSTSSRSLVSHTSSSTSIASISFTSFSFSSDSSTSSSSSASSDSSSSSSFSISSTSATSESSTSSTQTSTSSSSSLSSTPSSSSSPSTITSAPSTSSTPSTTAYNQGSTITSIINGKTILSNHYTTVTYTPSATADSSNKSKSSGLSKKNRNIVIGCVVGIGVPLILVILALIYMFCIQSSRTDFIDSDGKVVTAYRANKFTKWWYMLLGKKVSDEYHSDSPLGGSASSAGGLDLDEADDVMEQSSLFDVRIRDSDSVLPNANTADHNNTNSGGEPINSSVASNDIIEEKFYDEQGNELSPRNY

SEQ ID NO: 207 - DNA, 1515 bp, Saccharomyces cerevisiae
atgcaaagcccatatccaatgacacaagtgtctaacgttgatgatgggtcactattgaaggagagtaaaagcaagtccaaagtagctgcgaagtcagaggcgccaagaccacatgcttgtcctatctgtcatagagcttttcacagactggaacatcagacgagacacatgagaattcatacaggtgagaagcctcacgcgtgtgacttccccggatgtgtgaaaaggttcagtagaagcgatgaactgacgagacacagaagaattcatacaaactcccaccctcgaggtaaaagaggcagaaagaagaaggttgtgggctctccaataaatagtgctagttctagtgctaccagtataccagatttaaatacggcaaatttttcaccgccattaccacagcaacacctatcgcctttaattcctattgctattgctccgaaagaaaattcaagtcgatcttctacaagaaaaggtagaaaaaccaaattcgaaatcggcgaaagtggtgggaatgacccatatatggtttcttctcccaaaacgatggctaagattcccgtctcggtgaagcctccaccttctttagcactgaataatatgaactaccaaacttcatccgcttccactgctttgtcttcgttgagcaatagccatagtggcagtagactgaaactgaacgcgttatcgtccctacaaatgatgacgcccattgctagcagtgcgccaaggactgttttcatagacggtcctgaacagaaacaactacaacaacaacaaaattctctttcaccacgttattccaacactgttatattaccaaggccgcgatctttaacggattttcaaggattgaacaatgcaaatccaaacaacaatggaagtctcagagcacaaactcagagttccgtacagttgaagagaccaagttcagttttaagtttgaacgacttgttggttggccaaagaaataccaacgaatctgactctgattttactactggtggtgaggatgaagaagacggactaaaggacccgtctaactctagtatcgataaccttgagcaagactatttgcaagagcaatcaagaaagaaatctaagacttccacgcccacgacaatgctaagtagatccactagtggtacgaatttgcacactttggggtatgtaatgaaccaaaatcacttgcatttctcctcatcatctcctgatttccaaaaggagttgaacaacagattactgaacgttcaacaacagcagcaagagcaacataccctactgcaatcacaaaatacgtcaaaccaaagtcaaaatcaaaatcaaaatcaaatgatggcttccagtagttcgttaagtacaaccccgttattattgtcaccaagggtgaatatgattaatactgctatatccacccaacaaacccccatttctcagtcggattcacaagttcaagaactggaaacattaccacccataagaagtttaccgttgcccttcccacacatggactga

SEQ ID NO: 208 - protein, 504 aa, Saccharomyces cerevisiae
MQSPYPMTQVSNVDDGSLLKESKSKSKVAAKSEAPRPHACPICHRAFHRLEHQTRHMRIHTGEKPHACDFPGCVKRFSRSDELTRHRRIHTNSHPRGKRGRKKKVVGSPINSASSSATSIPDLNTANFSPPLPQQHLSPLIPIAIAPKENSSRSSTRKGRKTKFEIGESGGNDPYMVSSPKTMAKIPVSVKPPPSLALNNMNYQTSSASTALSSLSNSHSGSRLKLNALSSLQMMTPIASSAPRTVFIDGPEQKQLQQQQNSLSPRYSNTVILPRPRSLTDFQGLNNANPNNNGSLRAQTQSSVQLKRPSSVLSLNDLLVGQRNTNESDSDFTTGGEDEEDGLKDPSNSSIDNLEQDYLQEQSRKKSKTSTPTTMLSRSTSGTNLHTLGYVMNQNHLHFSSSSPDFQKELNNRLLNVQQQQQEQHTLLQSQNTSNQSQNQNQNQMMASSSSLSTTPLLLSPRVNMINTAISTQQTPISQSDSQVQELETLPPIRSLPLPFPHMD

SEQ ID NO: 209 - DNA, 1149 bp, Saccharomyces cerevisiae
atgcctaaaaagcaaacgaatttcccagtagataacgaaaacagaccttttagatgtgatacctgtcaccgtggtttccatcggttagaacataaaaagagacacttgagaacacacactggggaaaaacctcatcattgcgcatttcctggttgtgggaaaagtttcagtagaagcgatgaactgaaaaggcacatgagaacgcatacagggcaatctcaaaggagattgaagaaagctagcgtacagaaacaggagtttttgacagtaagcggaattcctaccattgcatcgggcgtgatgatacaccaaccaataccgcaagtcctaccagcaaatatggccataaatgttcaggcagtaaatggaggtaacattatacacgctcccaatgcggtgcacccaatggtgataccaatcatggcccaaccagcccccattcatgcctccgctgcatctttccagcctgcaacttctcctatgccaatttctacatacactccagttccatcgcaatcattcacctctttccagagctctattggctccatacagtcaaatagtgatgtttcatctatcttctcgaacatgaatgttcgcgtaaacactccacgctctgtgccaaactctccgaatgatggatatttacaccagcaacatatcccacagcagtatcagcatcaaactgccagcccttctgttgccaagcagcagaaaacttttgcacattctcttgcatctgcattatctaccttacaaaaaagaacgcctgtaagtgccccttccaccactatagaatcaccatcctcaccaagtgattccagtcatacctctgcatccagcagcgctatctctttgcctttcagcaatgctccttctcagctcgccgtggccaaagaacttgagtccgtctatttagattccaatagatacaccaccaagactaggagggaaagagcaaaattcgaaattcctgaagaacaagaagaagataccaataacagcagcagtggtagtaatgaggaggagcacgagtcgctagatcatgaatctagcaaaagccgaaagaaattgtcaggcgtaaaattgccgcctgtacgtaacctactgaaacaaattgatgttttcaacggtcccaaaagagtttaa

SEQ ID NO: 210 - protein, 382 aa, Saccharomyces cerevisiae
MPKKQTNFPVDNENRPFRCDTCHRGFHRLEHKKRHLRTHTGEKPHHCAFPGCGKSFSRSDELKRHMRTHTGQSQRRLKKASVQKQEFLTVSGIPTIASGVMIHQPIPQVLPANMAINVQAVNGGNIIHAPNAVHPMVIPIMAQPAPIHASAASFQPATSPMPISTYTPVPSQSFTSFQSSIGSIQSNSDVSSIFSNMNVRVNTPRSVPNSPNDGYLHQQHIPQQYQHQTASPSVAKQQKTFAHSLASALSTLQKRTPVSAPSTTIESPSSPSDSSHTSASSSAISLPFSNAPSQLAVAKELESVYLDSNRYTTKTRRERAKFEIPEEQEEDTNNSSSGSNEEEHESLDHESSKSRKKLSGVKLPPVRNLLKQIDVFNGPKRV

SEQ ID NO: 211 - DNA, 1527 bp, Saccharomyces cerevisiae
atggcttcactgttcagacccccagaatctgcgaaatgcaacccaaactctcctagacttaaactgcccctcttacgaaataatcaggtagatgaaaataatatatacttgacgtcgaatgggagttccaccacagcttacagtagccacaccccagaaccactgacctcttccacatcgacacttttctcccaaactcgacttcatcctagcgactcttcaatgactttaaatacaatgaagaagaggcctgcaccgccatctttaccttcgctcagcataaattcacagtctaagtgcaaaacactacccgaactcgtacccatcgccgatgtgtctgatggtaaacatgatttaggattgaaacagcgtgtgatagccgaaaatgagttgtctggtaatagtgacttaaccccttcatcgatggcaagccccttttcacatacaaacacctcttctccctacctcagaaatgatctgagcaattcagtgggatctgacttttcaaatttgatatcggcatatgaacaaagttcaagtcccatcaagtcatcgtcccagcctaaatcatcttctgaatcgtacatagacttaaacagtgtacgagatgttgatcaattggatgaaaatggttggaaatatgcaaatttaaaagataggatcgagacattaggcattctaggagaaggagccggtggctctgtttccaagtgtaaattgaaaaatggatcaaaaatattcgctttaaaagtgataaacacattaaatacagatcccgagtatcagaagcaaatattcagagaattacagtttaataggagtttccaatccgaatatatcgtacgatattatggaatgtttacggatgacgaaaactcttcaatttatattgctatggagtacatgggtgggcgatcgttggatgctatttataaaaatttgttagagcgtggtggtaggatcagtgaaaaagtcctggggaagattgcagaagcggtactaagaggactatcatatttgcatgaaaaaaaagttattcatagagatattaagccccagaatattttactgaatgaaaatggtcaggtgaaactttgtgattttggggtcagtggagaagccgttaactcgctagccacaacattcacggggacgtcattctatatggctccagaaaggattcaaggtcaaccatacagtgtcacatctgatgtatggtcacttggattaacgattttggaagtggcgaacgggaaatttccatgctcttccgagaagatggcagccaatatagctccctttgaattgttaatgtggattttaacatttactcctgaattaaaggatgaacccgaatctaatatcatatggagtccatcattcaaatcctttatcgactactgtctgaaaaaagatagtcgtgaacggccatctccaagacaaatgatcaatcatccttggataaagggtcaaatgaaaaaaaatgtcaatatggaaaaattcgtgaggaagtgctggaaagattaa

SEQ ID NO: 212 - protein, 508 aa, Saccharomyces cerevisiae
MASLFRPPESAKCNPNSPRLKLPLLRNNQVDENNIYLTSNGSSTTAYSSHTPEPLTSSTSTLFSQTRLHPSDSSMTLNTMKKRPAPPSLPSLSINSQSKCKTLPELVPIADVSDGKHDLGLKQRVIAENELSGNSDLTPSSMASPFSHTNTSSPYLRNDLSNSVGSDFSNLISAYEQSSSPIKSSSQPKSSSESYIDLNSVRDVDQLDENGWKYANLKDRIETLGILGEGAGGSVSKCKLKNGSKIFALKVINTLNTDPEYQKQIFRELQFNRSFQSEYIVRYYGMFTDDENSSIYIAMEYMGGRSLDAIYKNLLERGGRISEKVLGKIAEAVLRGLSYLHEKKVIHRDIKPQNILLNENGQVKLCDFGVSGEAVNSLATTFTGTSFYMAPERIQGQPYSVTSDVWSLGLTILEVANGKFPCSSEKMAANIAPFELLMWILTFTPELKDEPESNIIWSPSFKSFIDYCLKKDSRERPSPRQMINHPWIKGQMKKNVNMEKFVRKCWKD

SEQ ID NO: 213 - DNA, 1521 bp, Saccharomyces cerevisiae
atggcttcaatgttcagaccaccagaatccaataggagtcaccaaaagactccaaaattaacgcttccagtaaatttagttcaaaatgcgaaatccactaatgatgggcaacatctcaaccggtcaccgtactcgtcagtgaacgaaagcccatactccaacaatagcacttcagctacttccactacgtcatccatggcttcaaattccactttgttgtacaatagatcatctactacaactattaaaaatagaccggtaccacctccattacctcccctagtactaacgcaaaaaaaagacggtatagaatatagagttgccggcgatagtcagctttctgaaagattttctaatttgcatgttgatataacttacaaggaactactatctagtgctccaatttccactaagttatccaacatagataccacttttatcaagaaagatctcgacacaccagaaggcgaggattcatacccctcgacacttctttctgcgtacgacttcagcagtagcgggagcaactccgcccctttaagtgcaaataacataatttcttgttccaacttaatacaaggaaaagacgtagaccagttagaggaagaagcatggaggtttgggcatctcaaggatgagattactacactaggaattctaggagaaggcgcgggtggttctgtagccaagtgccgattaaaaaatggaaaaaaggtttttgcgttgaagacaatcaacactatgaatactgacccagaatatcaaaagcaaatattcagagagctacaatttaataagagttttaagtccgattatattgtgcagtactatggtatgtttaccgacgaacagagttcttcaatatacattgccatggaatatatgggaggaaaatcactggaggcaacgtataaaaatttgttgaaacgtggcggtagaataagtgagagggtgataggaaagatagcagaatctgtcttaagaggtttatcatacttacacgaaaggaaagtcatccacagggacattaaaccccaaaacattcttcttaatgaaaaaggggaaatcaaattatgcgatttcggtgtcagtggggaggctgttaactctttagcgatgacatttactggaacgtcattttatatggccccagaacgaatacaaggccaaccatacagcgtaacctgtgatgtatggtccttaggattaactcttctggaggttgctggagggagatttccatttgaatctgacaaaataacgcaaaacgtggctcctatagaattattgacgatgatcctgacgttttctccccagttgaaagatgagccagaactagacatatcctggagcaagacatttagatcttttatcgactattgtttaaaaaaagatgccagagagaggccttctcccaggcaaatgttaaagcatccctggattgtagggcaaatgaaaaaaaaagtcaacatggaacggtttgtaaagaaatgctgggaaaaggaaaaggatgggatataa

SEQ ID NO: 214 - protein, 506 aa, Saccharomyces cerevisiae [sequence omitted]

SEQ ID NO: 215 - DNA, 1149 bp, Saccharomyces cerevisiae
atggcaagtaaccagcacataggagcttcaaacctaaatgagaatgaggctatattaaccaaccgcgttgctgagctggaaaggcgtatgtcgatgtttgagggtatatttcacgcgttaagtaaccgtctcgatcttcactttaaaaaatatgatgtagtggtaaactcccaacagcaacaaatcaacgaactgaccgcgtttttatcaacattgctgaatgaccaacaacgccacgctgaaattctcagtgaaaaattaagcggaacgttgcatggggtgtcagctacgtcaatatccttaagccaaactcttgacccacaaggcttcactgatggaactacggcaccaggagctcctaggaattatacttcagtgcctatgaataatgatcaaactgctcatccgcaaaatgaaggagctgttagtaatgaaacactttttgaggacattttgaatggaaattcacaagaaaatgataagagtcaacaacaaactaacagctcaaattctataagccaagaaaataatagcaccaacccttcagtggacactcggttcaacaagccgcaaaattataattccaatttagtcccatccttggaagagtattcagcaaatccacctaacaatgatggtggccaaagtcaaggactgtacataagcagcaactcttctcaatcacggcagtctcctaatctccagaaagtttctcctaaccatgaaaatgcggttgaatcaaatgcacaagagagcgtgccgacatttgaggaggaacagtatgagactaaaacaggattgaaacggaaacgaatagtctgcacaagacccttcgaatttatcaagtcaccacactctgtgatggaggtttggaaggagtatacagaaggtgttaacgggcagccttctataaggaaaatggaagctctttatcaaacggcatggaggcgagatccagcagtaaataaaagatattcgagaagaaaggttctttggaaagccattcaaactggccttaatcgtgggtattcattaaactatgttgttgaaatattagaaaactcaagatatgttaatgataaacagaaggttaaacaacctattggttggttatgccacagttctcatattccagagactttgaagtga

SEQ ID NO: 216 - protein, 382 aa, Saccharomyces cerevisiae
MASNQHIGASNLNENEAILTNRVAELERRMSMFEGIFHALSNRLDLHFKKYDVVVNSQQQQINELTAFLSTLLNDQQRHAEILSEKLSGTLHGVSATSISLSQTLDPQGFTDGTTAPGAPRNYTSVPMNNDQTAHPQNEGAVSNETLFEDILNGNSQENDKSQQQTNSSNSISQENNSTNPSVDTRFNKPQNYNSNLVPSLEEYSANPPNNDGGQSQGLYISSNSSQSRQSPNLQKVSPNHENAVESNAQESVPTFEEEQYETKTGLKRKRIVCTRPFEFIKSPHSVMEVWKEYTEGVNGQPSIRKMEALYQTAWRRDPAVNKRYSRRKVLWKAIQTGLNRGYSLNYVVEILENSRYVNDKQKVKQPIGWLCHSSHIPETLK

SEQ ID NO: 217 - DNA, 2115 bp, Saccharomyces cerevisiae
atgacggtcgaccatgatttcaatagcgaagatattttattccccatagaaagcatgagtagtatacaatacgtggagaataataacccaaataatattaacaacgatgttatcccgtattctctagatatcaaaaacactgtcttagatagtgcggatctcaatgacattcaaaatcaagaaacttcactgaatttggggcttcctccactatctttcgactctccactgcccgtaacggaaacgataccatccactaccgataacagcttgcatttgaaagctgatagcaacaaaaatcgcgatgcaagaactattgaaaatgatagtgaaattaagagtactaataatgctagtggctctggggcaaatcaatacacaactcttacttcaccttatcctatgaacgacattttgtacaacatgaacaatccgttacaatcaccgtcaccttcatcggtacctcaaaatccgactataaatcctcccataaatacagcaagtaacgaaactaatttatcgcctcaaacttcaaatggtaatgaaactcttatatctcctcgagcccaacaacatacgtccattaaagataatcgtctgtccttacctaatggtgctaattcgaatcttttcattgacactaacccaaacaatttgaacgaaaaactaagaaatcaattgaactcagatacaaattcatattctaactccatttctaattcaaactccaattctacgggtaatttaaattccagttattttaattcactgaacatagactccatgctagatgattacgtttctagtgatctcttattgaatgatgatgatgatgacactaatttatcacgccgaagatttagcgacgttataacaaaccaatttccgtcaatgacaaattcgaggaattctatttctcactctttggacctttggaaccatccgaaaattaatccaagcaatagaaatacaaatctcaatatcactactaattctacctcaagttccaatgcaagtccgaataccactactatgaacgcaaatgcagactcaaatattgctggcaacccgaaaaacaatgacgctaccatagacaatgagttgacacagattcttaacgaatataatatgaacttcaacgataatttgggcacatccacttctggcaagaacaaatctgcttgcccaagttcttttgatgccaatgctatgacaaagataaatccaagtcagcaattacagcaacagctaaaccgagttcaacacaagcagctcacctcgtcacataataacagtagcactaacatgaaatccttcaacagcgatctttattcaagaaggcaaagagcttctttacccataatcgatgattcactaagctacgacctggttaataagcaggatgaagaccccaagaacgatatgctgccgaattcaaatttgagttcatctcaacaatttatcaaaccgtctatgattctttcagacaatgcgtccgttattgcgaaagtggcgactacaggcttgagtaatgatatgccatttttgacagaggaaggtgaacaaaatgctaattctactccaaatttcgatctttccatcactcaaatgaatatggctccattatcgcctgcatcatcatcctccacgtctcttgcaacaaatcatttctatcaccatttcccacagcagggtcaccataccatgaactctaaaatcggttcttcccttcggaggcggaagtctgctgtgcctttgatgggtacggtgccgcttacaaatcaacaaaataatataagcagtagtagtgtcaactcaactggcaatggtgctggggttacgaaggaaagaaggccaagttacaggagaaaatcaatgacaccgtccagaagatcaagtgtcgtaatagaatcaacaaaggaactcgaggagaaaccgttccactgtcacatttgtcccaagagctttaagcgcagcgaacatttgaaaaggcatgtgagatctgttcactctaacgaacgaccatttgcttgtcacatatgcgataagaaatttagtagaagcgataatttgtcgcaacacatcaagactcataaaaaacatggagacatttaa

SEQ ID NO: 218 - protein, 704 aa, Saccharomyces cerevisiae
MTVDHDFNSEDILFPIESMSSIQYVENNNPNNINNDVIPYSLDIKNTVLDSADLNDIQNQETSLNLGLPPLSFDSPLPVTETIPSTTDNSLHLKADSNKNRDARTIENDSEIKSTNNASGSGANQYTTLTSPYPMNDILYNMNNPLQSPSPSSVPQNPTINPPINTASNETNLSPQTSNGNETLISPRAQQHTSIKDNRLSLPNGANSNLFIDTNPNNLNEKLRNQLNSDTNSYSNSISNSNSNSTGNLNSSYFNSLNIDSMLDDYVSSDLLLNDDDDDTNLSRRRFSDVITNQFPSMTNSRNSISHSLDLWNHPKINPSNRNTNLNITTNSTSSSNASPNTTTMNANADSNIAGNPKNNDATIDNELTQILNEYNMNFNDNLGTSTSGKNKSACPSSFDANAMTKINPSQQLQQQLNRVQHKQLTSSHNNSSTNMKSFNSDLYSRRQRASLPIIDDSLSYDLVNKQDEDPKNDMLPNSNLSSSQQFIKPSMILSDNASVIAKVATTGLSNDMPFLTEEGEQNANSTPNFDLSITQMNMAPLSPASSSSTSLATNHFYHHFPQQGHHTMNSKIGSSLRRRKSAVPLMGTVPLTNQQNNISSSSVNSTGNGAGVTKERRPSYRRKSMTPSRRSSVVIESTKELEEKPFHCHICPKSFKRSEHLKRHVRSVHSNERPFACHICDKKFSRSDNLSQHIKTHKKHGDI

SEQ ID NO: 219 - DNA, 1893 bp, Saccharomyces cerevisiae
atgctagtcttcggacctaatagtagtttcgttcgtcacgcaaacaagaaacaagaagattcgtctataatgaacgagccaaacggattgatggacccggtattgagcacaaccaacgtttctgctacttcttctaatgacaattctgcgaacaatagcatatcttcgccggaatatacctttggtcaattctcaatggattctccgcatagaacggacgccactaatactccaattttaacagcgacaactaatacgactgctaataatagtttaatgaatttaaaggataccgccagtttagctaccaactggaagtggaaaaattccaataacgcacagttcgtgaatgacggtgagaaacaaagcagtaatgctaatggtaagaaaaatggtggtgataagatatatagttcagtagccacccctcaagctttaaatgacgaattgaaaaacttggagcaactagaaaaggtattttctccaatgaatcctatcaatgacagtcattttaatgaaaatatagaattatcgccacaccaacatgcaacttctcccaagacaaaccttcttgaggcagaaccttcaatatattccaatttgtttctagatgctaggttaccaaacaacgccaacagtacaacaggattgaacgacaatgattataatctagacgataccaataatgataatactaatagcatgcaatcaatcttagaggattttgtatcttcagaagaagcattgaagttcatgccggacgctggtcgcgacgcaagaagatacagcgaggtggttacctcttcctttccttctatgacggattctagaaattcgatctctcattcgatagagttttggaatctcaatcacaaaaatagtagcaacagtaaacccactcaacaaattatccctgaaggtactgccactactgagaggcgtggatcaaccatttcacctactaccactataaacaactctaatccaaacttcaaattattagatcatgacgtttctcaagctctgagcggttatagtatggatttttctaaggactctggtataacaaagccaaaaagcatttcctcttctttaaatcgcatctcccatagcagtagcaccacaaggcaacagcgtgcctctttgcccttaattcatgatattgaatcttttgcaaatgattcggtgatggcaaatcctctgtctgattccgcatcatttctttcagaagaaaatgaagacgatgcttttggtgcgctaaattacaatagcttagatgcaaccacaatgtcggcattcgacaataacgtagaccccttcaacattctcaagtcatctccggctcaggatcaacagtttatcaaaccctctatgatgttgtcggataatgcctctgctgccgctaaattggcgacttctggtgttgataatatcacacctacaccagctttccaaagaagaagctatgatatctcgatgaactcttcgttcaaaatacttcctactagtcaagctcaccatgcagctcaacatcatcaacaacaacctactaaacaggcaacggtaagcccaaacacaagaagaagaaagtcgtcaagtgttactttaagtccaactatttctcataacaacaacaatggtaaggttcctgtccaacctcggaaaaggaaatctattactaccattgaccccaacaactacgataaaaataaacctttcaagtgtaaagactgtgagaaggcattcagacgcagtgagcacttgaaaaggcatataagatccgttcattcaacggaacgcccttttgcttgtatgttctgtgagaaaaaattcagtagaagtgacaatttatcacaacatctaaaaactcacaaaaagcacggtgatttttga

SEQ ID NO: 220 - protein, 630 aa, Saccharomyces cerevisiae
MLVFGPNSSFVRHANKKQEDSSIMNEPNGLMDPVLSTTNVSATSSNDNSANNSISSPEYTFGQFSMDSPHRTDATNTPILTATTNTTANNSLMNLKDTASLATNWKWKNSNNAQFVNDGEKQSSNANGKKNGGDKIYSSVATPQALNDELKNLEQLEKVFSPMNPINDSHFNENIELSPHQHATSPKTNLLEAEPSIYSNLFLDARLPNNANSTTGLNDNDYNLDDTNNDNTNSMQSILEDFVSSEEALKFMPDAGRDARRYSEVVTSSFPSMTDSRNSISHSIEFWNLNHKNSSNSKPTQQIIPEGTATTERRGSTISPTTTINNSNPNFKLLDHDVSQALSGYSMDFSKDSGITKPKSISSSLNRISHSSSTTRQQRASLPLIHDIESFANDSVMANPLSDSASFLSEENEDDAFGALNYNSLDATTMSAFDNNVDPFNILKSSPAQDQQFIKPSMMLSDNASAAAKLATSGVDNITPTPAFQRRSYDISMNSSFKILPTSQAHHAAQHHQQQPTKQATVSPNTRRRKSSSVTLSPTISHNNNNGKVPVQPRKRKSITTIDPNNYDKNKPFKCKDCEKAFRRSEHLKRHIRSVHSTERPFACMFCEKKFSRSDNLSQHLKTHKKHGDF

SEQ ID NO: 221 - DNA, 3675 bp, Saccharomyces cerevisiae
atggattccacaggcgcttctcagattgttagcgcactagatgttatttactcccccaagtctaacaattctcaacggcaagaagctcagaaatttttagatgaagtgaaattatgctcagaatcgcccttttggggctacgaaattgcattgcaaaaccccactaattctatattgaaatactttggactaggattactagaccatgcagtgaagaaaaactggaatgattatgacgaggggaaaagagtggccctgagaaaatgggtcatggaacttaattttggggtgcaagattatgataccagatatattaaggaaaaattagccactttatgggtagaggtggcaaaaagaacatggggtgaggctcttaagcagacaaaccctacggaagaacagttactcacatcttgggtggacatggacaataaccttttcgaactttggaacataaatcaatcgtcaagagaactagcattaataattttcagaatcctttttgaagatgttttcttgttggacgacctaattgttttgaaaaggatgacggttattcaacccttatgtgtaatgattgtttgccctattgaagttttcgcaataaaatacaaattcagtgataaatggaccaaatttaaagctaatgaagagggctggttttctgtttggattccagagttgaataatgcattacaacagaataattctgaatacatcataaggcttttagaaactctgaagacgtgtttaaactggccattaacagaggtcattgtaagaaatgacgtgttatcctccttattgacttgtttatccagcaatatcccaagggcgcagtcaatggcattagactcgatacatattctgttgacccgtccctatagtaatgaaagccattaccaaatgaccatagatcgagtttttgataatatggacttattagatagcgtttatgaaagcttgttgtttgatcctacagatgatatagatgaaacgaaatatcctataattaaaaagttcgtggatatgatcagttgtctctatgtttgtgtcccaaagattaaggagacaaatggccaaattcaaaaatattttaagcttgtattaaagacaacttataacccaagcttaatcgttagcggattaacattagacctatggtgtacctgtcttcgaaacgatgaatacttacccaagctggagaaatatgtcattcctgatctactacagtttgccgcggatgctttagtctattatgaacagattgatggtcatatttccaaaaaatttgcggagattgattttcaatccaagtccgaatttcaaacattttgttccacttataggaaaagaataagagacatcattaggttgatttcttgcgtcgaattagaccttacttatgattggttgaacaacagattaaacaattatttcagctctccatttggtcagcaggtcttaagttccacatttttggaccataaattagagccttatttaggtgccctctcccaatacatgattgttgaatgtttcatcaatggttgtataagatggaagatctggtatccaacaggagatgattatgacgaaaaactagattccatattacaaaaactggaaattttgtcaaaccagttaattgcattaaatttaagagaaccattgttattgaagaaacaaatccaaaattttgcactttttttgacaatgttaaaagataatgtgcttttcacacttttagaaaaaatcataacaagcgccacgatggactatccagaaattaatttggaagagagaggcgctgaatcagacgcagttagagatttgagatatgcttgtggtatcgagttgaataggatggctttattaatgcccgaatctctgaaaaaaatatacccagaccttgaaagtgtcattgccagaatcatgcccaacttatcttaccatgaaaaaatttccttcaaatccttcttattgatcattgtattgaagtcttcattagatatgaaagaggaaagatttgcggctattgtggatccagaacttttagcctggtctgataaaacaacagttgttggtctttctgatttgcattggtttatggaacgcttaggtattgttcagatcgcagaatatttccagaggcgtgatatcgacgaaaatagtgaccttttatcaattccaattgatgatgagggtaaagagctgaagtcggaattgaccaaacgttggcaaagcttgtttcctgttcgtgcaacaagaatgttcattcattattcaatgcaaagtataaagacagatgaagaattcaaaatgctacaagatctgtggagacctaggattgtcccaatattaccttacatcacgagactactgtaccaattgcaatcctaccacgatccagataattggaaaggattacctacggttgtgcaatccttcgtcaagtattccactattgaaagattttgggaggccggagcttcaaataaatcaaaggatgagtttattgatgaacatatgaaagcgatgcaaaccttacgagacttcgccgactccgtaggacacatcattaggtatacaagggaatacactctacttgttttaagtgccatatcatcacttggtagtgttttttaccttttggacgaatcgcccgacctactactgaactctattgccatatttaagccaggtagcaatgagataagccctggagtttcaacacatggatggaaacacataatgaatatagccattcgtcctatattaaaaggttgtccaaaagattgtctggggaaattcatgcccgcatttttgcctaaattatttgaaatcctggacctgctgctatgtcagaaatggtcctcgcatatgaatgatatggacatgaacccagttccaactgacgatgatcaaatgactgaagaaattttggaagagaatttgttgagacaactaaccacagttgttgttagaatagtaattgattgtgttggtcaaggcaatgccaatccaaacagtgctaaaagcaggctaaataaccatcaaatggagatgagaaaaattatatttaatgatttaaacacccttgctccatttttgaaacttttgaaccatttaatttccttcaaggatacaaaatgttcatttaactccatcctagtaatgaaatgctgcttaacctcagtccttaatcaaaacaacacggtggatgaatatttcacatttgaagtgatgaaaaatctgttgctaaatgtgctgtgtaatagtgcgtttaaggattctttccatgaggcactatatgctttcactgtgatttttttgactctgtgcaaagaatatccctctgctagagcgttcctttttgagatatctaatggttataatattgatgagttatacagaaatttaaggagcgtggacgaatacaaaacacaaagggcactcatgattgattttatagattgggttaaatccaccagtgggaaagaagatggtaatgtggaccatgcaggcgatgagagaaaaagacaagagaaaagggaagctatcctcaagaaggcaaatgagagattaattaagaagaataaagaaaacggagacatgctggatgatccgaacattgaagacggtgctgtgggtaatctctttgatgacaactga

SEQ ID NO: 222 - protein, 1224 aa, Saccharomyces cerevisiae
MDSTGASQIVSALDVIYSPKSNNSQRQEAQKFLDEVKLCSESPFWGYEIALQNPTNSILKYFGLGLLDHAVKKNWNDYDEGKRVALRKWVMELNFGVQDYDTRYIKEKLATLWVEVAKRTWGEALKQTNPTEEQLLTSWVDMDNNLFELWNINQSSRELALIIFRILFEDVFLLDDLIVLKRMTVIQPLCVMIVCPIEVFAIKYKFSDKWTKFKANEEGWFSVWIPELNNALQQNNSEYIIRLLETLKTCLNWPLTEVIVRNDVLSSLLTCLSSNIPRAQSMALDSIHILLTRPYSNESHYQMTIDRVFDNMDLLDSVYESLLFDPTDDIDETKYPIIKKFVDMISCLYVCVPKIKETNGQIQKYFKLVLKTTYNPSLIVSGLTLDLWCTCLRNDEYLPKLEKYVIPDLLQFAADALVYYEQIDGHISKKFAEIDFQSKSEFQTFCSTYRKRIRDIIRLISCVELDLTYDWLNNRLNNYFSSPFGQQVLSSTFLDHKLEPYLGALSQYMIVECFINGCIRWKIWYPTGDDYDEKLDSILQKLEILSNQLIALNLREPLLLKKQIQNFALFLTMLKDNVLFTLLEKIITSATMDYPEINLEERGAESDAVRDLRYACGIELNRMALLMPESLKKIYPDLESVIARIMPNLSYHEKISFKSFLLIIVLKSSLDMKEERFAAIVDPELLAWSDKTTVVGLSDLHWFMERLGIVQIAEYFQRRDIDENSDLLSIPIDDEGKELKSELTKRWQSLFPVRATRMFIHYSMQSIKTDEEFKMLQDLWRPRIVPILPYITRLLYQLQSYHDPDNWKGLPTVVQSFVKYSTIERFWEAGASNKSKDEFIDEHMKAMQTLRDFADSVGHIIRYTREYTLLVLSAISSLGSVFYLLDESPDLLLNSIAIFKPGSNEISPGVSTHGWKHIMNIAIRPILKGCPKDCLGKFMPAFLPKLFEILDLLLCQKWSSHMNDMDMNPVPTDDDQMTEEILEENLLRQLTTVVVRIVIDCVGQGNANPNSAKSRLNNHQMEMRKIIFNDLNTLAPFLKLLNHLISFKDTKCSFNSILVMKCCLTSVLNQNNTVDEYFTFEVMKNLLLNVLCNSAFKDSFHEALYAFTVIFLTLCKEYPSARAFLFEISNGYNIDELYRNLRSVDEYKTQRALMIDFIDWVKSTSGKEDGNVDHAGDERKRQEKREAILKKANERLIKKNKENGDMLDDPNIEDGAVGNLFDDN

SEQ ID NO: 223 - DNA, 2277 bp, Saccharomyces cerevisiae
atggataacacgaccaatattaatacaaatgagcgctctagtaacacggattttagctcagctcccaatatcaaaggtttgaatagccatactcagttgcagtttgatgcggattctcgagttttcgtttcggatgtaatggctaagaactctaagcaattattgtacgcccatatttataactatttaatcaaaaacaattactggaactctgccgcaaaatttttaagcgaagctgaccttcctttatctagaataaacggatctgcttcgggtgggaaaactagcttgaacgccagcctgaagcagggattaatggatattgcatctaagggtgacattgttagtgaagatgggctattaccttcgaaaatgctgatggacgctaatgacacgtttttactggaatggtgggaaatttttcaatcattgttcaatggagacctagaatctgggtaccaacaggatcataatcctttaagagagagaataataccaattttgccagctaattctaaatctaatatgccttcccatttctctaatctcccaccaaatgtgattccaccaactcaaaatagttttccagtttcagaggagagttttaggcccaatggtgacggaagtaactttaatttaaacgatccaaccaatcgaaacgtctccgaaagatttctatcgagaacttccggtgtctacgacaaacagaatagcgctaattttgcacctgatactgctataaacagtgatattgctgggcagcagtacgcaactataaatctacataaacacttcaatgatttgcaatcaccagcacagccccagcaatcatctcaacagcagatccagcagcctcagcatcaaccccagcatcaaccgcaacagcaacagcaacagcaacaacaacaacaacaacagcaacagcaacagcaacagcaacagcagcaacagcaacagcaacagcaacaacatcaacagcagcaacagacaccgtatcctattgtcaacccacaaatggtccctcatattccatcggaaaattctcattcaaccggacttatgccttcagtgcctcctacaaatcaacaatttaatgcacaaacccaatcttcaatgttttcagaccagcagcgcttctttcaatatcaattacaccaccaaaatcaaggacaggcgccatcttttcagcaaagccaatctggcaggtttgatgacatgaacgctatgaaaatgttttttcagcagcaagcactacagcaaaattcactacagcaaaatcttggaaatcaaaattatcaatctaatacacgtaacaatactgcggaagaaactacgcccacaaatgacaataacgcaaatggcaatagtttattgcaagaacacatacgagcccgcttcaataagatgaaaacaattcctcaacaaatgaaaaatcaaagcactgtcgcaaatccggttgttagtgatataacatctcaacagcagtacatgcatatgatgatgcaaagaatggcggctaaccagcaattacaaaatagtgcctttcctccagacactaatcgtatagcgccagctaacaacactatgccattacaaccaggaaatatggggtctcctgtcattgaaaatccaggtatgaggcagactaatccatccggacaaaaccctatgatcaatatgcagcccttatatcaaaatgtttcttccgcaatgcatgcgttcgctccgcaacaacaatttcatctaccacaacattataaaaccaatacttcagtaccacaaaatgattctacctccgtctttcctttgcctaacaataacaataacaataacaacaacaacaataataataataataataatagtaataatagtaataataataataataataataataataataataatagtaataatacacccacagtatcacaaccatcatcaaaatgtacttctagctccagcacaactcctaatataactacaacaattcaacccaagcggaaacagagagtgggtaaaacaaagaccaaggaatcaagaaaagttgctgcagctcagaaagttatgaaatctaagaaactggaacaaaatggtgattcagctgctacaaacttcatcaatgtcactccaaaggacagtggcggtaagggtaccgtaaaagttcaaaacagtaactcgcagcaacaactaaatggctctttttctatggatacagaaacattcgacatatttaacattggtgacttttctcctgatctaatggatagctaa

SEQ ID NO: 224 - protein, 758 aa, Saccharomyces cerevisiae
MDNTTNINTNERSSNTDFSSAPNIKGLNSHTQLQFDADSRVFVSDVMAKNSKQLLYAHIYNYLIKNNYWNSAAKFLSEADLPLSRINGSASGGKTSLNASLKQGLMDIASKGDIVSEDGLLPSKMLMDANDTFLLEWWEIFQSLFNGDLESGYQQDHNPLRERIIPILPANSKSNMPSHFSNLPPNVIPPTQNSFPVSEESFRPNGDGSNFNLNDPTNRNVSERFLSRTSGVYDKQNSANFAPDTAINSDIAGQQYATINLHKHFNDLQSPAQPQQSSQQQIQQPQHQPQHQPQQQQQQQQQQQQQQQQQQQQQQQQQQQQQQHQQQQQTPYPIVNPQMVPHIPSENSHSTGLMPSVPPTNQQFNAQTQSSMFSDQQRFFQYQLHHQNQGQAPSFQQSQSGRFDDMNAMKMFFQQQALQQNSLQQNLGNQNYQSNTRNNTAEETTPTNDNNANGNSLLQEHIRARFNKMKTIPQQMKNQSTVANPVVSDITSQQQYMHMMMQRMAANQQLQNSAFPPDTNRIAPANNTMPLQPGNMGSPVIENPGMRQTNPSGQNPMINMQPLYQNVSSAMHAFAPQQQFHLPQHYKTNTSVPQNDSTSVFPLPNNNNNNNNNNNNNNNNNSNNSNNNNNNNNNNNNSNNTPTVSQPSSKCTSSSSTTPNITTTIQPKRKQRVGKTKTKESRKVAAAQKVMKSKKLEQNGDSAATNFINVTPKDSGGKGTVKVQNSNSQQQLNGSFSMDTETFDIFNIGDFSPDLMDS

SEQ ID NO: 225 - DNA, 1302 bp, Saccharomyces cerevisiae
atgtttgtttcaccaccaccagcaacttcgaaaaaccaagttttacaacgacgtccattagaatcgactaacagtaatcatgggtttgcaagctccctacaggccattccggaaaacacgatgagtggcagtgataatgcttcttttcaaagtttgccactatcaatgagtagctctcaatccacgacttcttcgagaagagagaactttgtgaatgctcctccggagtacactgatagagctagagatgagattaaaaaaagattattggcctcctcacctagcagaaggtcacatcattcaagcagtatgcattcagcgagcaggagatcaagcgtggctgaaagtgggagtttactttcggataatgcctcgtcttatcaatcaagtatattttctgccccctctactgtgcacacgcaactaactaatgactcttcgttctccgaatttcctaaccacaagttaatcacgagagtgagcctggatgaagcattacccaaaacgttttatgacatgtattcgccagatattctattagcagacccatccaacattctctgtaacgggcgtcccaagtttaccaagagagagttattggattgggatttaaacgatataagatcgttattgatagtcgagaagttaaggcccgaatggggtaatcaactaccggaagtaataacggtgggtgataatatgccccagtttaggttacaattattaccactatattctagcgatgagaccataatcgcaacgttagtccattcggatctgtacatggaggctaacttagattatgaattcaaactaaccagcgccaaatatacagtagcgaccgctagaaaaagacatgagcatataactggtagaaatgaagccgtcatgaatttgtcgaaaccggaatggagaaatatcatcgaaaattacctcttaaatatagcagtagaggcacaatgcaggtttgatttcaaacaaagatgctccgaatataagaaatggaagttacaacagtccaacttaaaaagaccggacatgcccccaccaagcataataccgcggaaaaacagcacagaaacaaaatcgcttctgaaaaaggctttattgaagaacattcagttgaaaaaccccaataataaccttgatgaattgatgatgagatcaagcgccgcaacaaatcaacagggaaaaaacaaagtcagcttatctaaagaagaaaaggctacgatatggtcgcaatgtcaggcacaagtttaccaaagattaggattggattggcagccggattcagtatcctga

SEQ ID NO: 226 - protein, 433 aa, Saccharomyces cerevisiae
MFVSPPPATSKNQVLQRRPLESTNSNHGFASSLQAIPENTMSGSDNASFQSLPLSMSSSQSTTSSRRENFVNAPPEYTDRARDEIKKRLLASSPSRRSHHSSSMHSASRRSSVAESGSLLSDNASSYQSSIFSAPSTVHTQLTNDSSFSEFPNHKLITRVSLDEALPKTFYDMYSPDILLADPSNILCNGRPKFTKRELLDWDLNDIRSLLIVEKLRPEWGNQLPEVITVGDNMPQFRLQLLPLYSSDETIIATLVHSDLYMEANLDYEFKLTSAKYTVATARKRHEHITGRNEAVMNLSKPEWRNIIENYLLNIAVEAQCRFDFKQRCSEYKKWKLQQSNLKRPDMPPPSIIPRKNSTETKSLLKKALLKNIQLKNPNNNLDELMMRSSAATNQQGKNKVSLSKEEKATIWSQCQAQVYQRLGLDWQPDSVS

SEQ ID NO: 227 - DNA, 2373 bp, Saccharomyces cerevisiae
atgtcttcattaactcgattgctacaggaaaaacgaaaaaatgaaacttcgaactcatcaccgagaacttctgctgatacgttgaccacgacgcccgagtcacaatcgcttgaccttcactctaggaataagagtagtagtcatattggtagcgtgagtaatagcagcagtagtgatcgtaatagggctaacgtgccagttcctggcagtgtcacaactgttactcaaatatactcagaggaagattcatcatcaacagccggttcctctctcgacgataggaatcagttttcctccagcttccttaatgcaaactttgctcacactgcatcattctacggcacaagtgcacaaagtagagatagatttggatccttaataaacgatcaaggtactgcaggactttcctcacatggtggttcttttgctgcacagaacagaatcacaagtagattatctaccacgtcacatacttcaggaagggccattccttctttatcatcaagtataccttactccgtgccaaattctaacaaagataacaatagctcgaatagcaacagctcctctttgtcttcttcgtggctcgaaacatatgcaggcggtatgcccaataatatttctgcaatcgattcaaatgttatatcctccccaaaagtagatagcgtggaaccacgttttgttatctccaaacaaaaactccaaaaagcatcgatggatagtaataatgcaaatgccactcaatcaagatctatatcccgttcaggttcattctcttcacagcttgggaattttttcttttccaaaaactcaaaagaatcttcaaattctaactctgcaggcatgtctttttctgccaattccaatggtccttctccaaacattaagaatcccaatgttaccaatggttcgacgcctatcccgaagcctatccgcgcaagacaaagcagcatatattctgcatcaagacagccaactggttcctatactgataacttttacggttccccctcatctgtacatgaccacttacctccaagtcaaagtgttccaaggtcacaacattcttccatcggtgatttaaagaggttcttcaaaaaaagttctaacagtaacctttcctcgaatagtaacaacgtgatcccgaacggatcacctctttctagcggaattgccgttccgtcacactctcattcatcgtctcattttgccgcagggaataactcatattccactagttataacggaaatggagatactatttattctcatagtcacggcggttcaggaattccgttctcaaaaaggtacatcaaaaccggtgccgatttaggcgctggagcaggaggttctgtcaaattagctcaaagaatttcagataacaaaatatttgcagtgaaggagtttagaactaaatttgaaaatgaatccaaaagagattatgtcaagaaaattacatcagaatactgtattggtacaactttgaatcatcccaatatcattgaaacaattgaaatcgtgtatgaaaatgatagaattctccaagttatggaatattgtgaatacgatttatttgctattgtaatgagtaataaaatgtcctatgaagagatttgttgttgcttcaaacaaatacttactggtgtacaatatttgcatagtatcggcttagctcatagagatctaaagctagataattgtgttataaacgaaaaaggtattgtaaaattaatcgattttggtgctgctgtggtattttcatatccattctcaaaaaatcttgtggaagcaagtggaattgttggaagtgatccatatttagcacctgaagtctgtatatttgcgaagtatgacccacgtcccgtagatatttggtcttctgcaatcatttttgcatgtatgatactgaagaaatttccatggaaaattccgaaattaagggacaattcattcaaactattttgttccggacgtgattgcgactccttaagtagcttggttacaagaactcctgatccaccttcctacgatgaatcgcactcaacagaaaagaaaaaacccgaaagctcttccaataatgtatcagatcctaataatgttaatatcgggccacaaagattgttgcactcattaccagaagagactcagcatattgttggacgtatgattgatttggcgcccgcatgcagaggaaatatcgaagaaatcatggaagatccttggatccgtagcattgatatgtgccacttggttgaagatggattatcgttcaaagtggttagaggagaagaccatcatcacacacaagtggatcaaagtgaagcacatattgcaggcctagaaaagaaaaagaaaaagcaaaataatcaataa

SEQ ID NO: 228 - protein, 790 aa, Saccharomyces cerevisiae
MSSLTRLLQEKRKNETSNSSPRTSADTLTTTPESQSLDLHSRNKSSSHIGSVSNSSSSDRNRANVPVPGSVTTVTQIYSEEDSSSTAGSSLDDRNQFSSSFLNANFAHTASFYGTSAQSRDRFGSLINDQGTAGLSSHGGSFAAQNRITSRLSTTSHTSGRAIPSLSSSIPYSVPNSNKDNNSSNSNSSSLSSSWLETYAGGMPNNISAIDSNVISSPKVDSVEPRFVISKQKLQKASMDSNNANATQSRSISRSGSFSSQLGNFFFSKNSKESSNSNSAGMSFSANSNGPSPNIKNPNVTNGSTPIPKPIRARQSSIYSASRQPTGSYTDNFYGSPSSVHDHLPPSQSVPRSQHSSIGDLKRFFKKSSNSNLSSNSNNVIPNGSPLSSGIAVPSHSHSSSHFAAGNNSYSTSYNGNGDTIYSHSHGGSGIPFSKRYIKTGADLGAGAGGSVKLAQRISDNKIFAVKEFRTKFENESKRDYVKKITSEYCIGTTLNHPNIIETIEIVYENDRILQVMEYCEYDLFAIVMSNKMSYEEICCCFKQILTGVQYLHSIGLAHRDLKLDNCVINEKGIVKLIDFGAAVVFSYPFSKNLVEASGIVGSDPYLAPEVCIFAKYDPRPVDIWSSAIIFACMILKKFPWKIPKLRDNSFKLFCSGRDCDSLSSLVTRTPDPPSYDESHSTEKKKPESSSNNVSDPNNVNIGPQRLLHSLPEETQHIVGRMIDLAPACRGNIEEIMEDPWIRSIDMCHLVEDGLSFKVVRGEDHHHTQVDQSEAHIAGLEKKKKKQNNQ

SEQ ID NO: 229 - DNA, 897 bp, Penicillium chrysogenum
atggcgaccacattgactgacgataagcgacctcaattgcagcctgtttgccagaattgcggcacctctaccacccccctgtggcgtagggacgaactcggttcagtcctttgcaacgcatgtggactcttcttgaaactgcatggccgacctcgtccgataagcttgaaaacagatgtgatcaaaagtcgcaatcgcgtgaagaccggccaaggccctaagcgcaagtcaggcggccctgttgataccaatggtatcccgccacgatctgaggctgggacccctccccttgggtcgcatggataccgtcgcgcgtcgcgcaagatgtcctcgggtcattcggatcgctccaactcccccgtttcccggaccgagacacctggatttggctcgatgaacgcgcacaactcgaacatcgcgccgcagcacatgtttgacagcgttaccctgggtgacagcatgaactcttccagcggcctcccctcccgccagatgcgccaaccttctccctcggcagtcgaccgccaactcgattccccccacacattcgaaagtctcctggccctcaacacatcccttaagacacgcgtcagtgaactcgagttcgtcaacgagctcttccgcggtcgcgttacggaactcgaacaaagtgacgctagcgcccgtcgatcggagatgattgtacgagactccgaggttcgtctgagacggtctctcgaggatgctcagcgtcgcgaggaggatctcaagcgtcgtgttagcgatctcgaacgccagcttggttctggcagcgccggcgacgccgagtccggcgagccactcgcaaaaaagatccggctgtcggatgttgtggaatctggcgaggatgtgcaggtcaaatctcccaagagcgtttag

SEQ ID NO: 230 - protein, 298 aa, Pencillium chrysogenum
MATTLTDDKRPQLQPVCQNCGTSTTPLWRRDELGSVLCNACGLFLKLHGRPRPISLKTDVIKSRNRVKTGQGPKRKSGGPVDTNGIPPRSEAGTPPLGSHGYRRASRKMSSGHSDRSNSPVSRTETPGFGSMNAHNSNIAPQHMFDSVTLGDSMNSSSGLPSRQMRQPSPSAVDRQLDSPHTFESLLALNTSLKTRVSELEFVNELFRGRVTELEQSDASARRSEMIVRDSEVRLRRSLEDAQRREEDLKRRVSDLERQLGSGSAGDAESGEPLAKKIRLSDVVESGEDVQVKSPKSV

SEQ ID NO: 231 - DNA, 696 bp, Saccharomyces cerevisiae
atgttttacccatataactatagtaacctcaatgtttctactatgcccgcactgccgggaatctccgcatttgatggaatgcaagatgaagaaaacgttgaaataagcccggaaagaaaatatcagacgctactaccagttctaactaattctcatgtggtagagaatgaactaaaacacaaattaaataagactgcttttgatttccgataccaaaccaaatcagaaaatggctctgaaaagtgggagccaaaatacttaataacgcctaatttacaaacaagaagcgtctcttttgacaattcatcggtacaatataattcagattcatccgaaaaaagctcgctatcacaactaacttgtaattcatcaataatacaacagcctgagaacggaatagtttctaatgatgcatataataagatggcaaatagtagatactctctgaaaacgcggaagcaaagaacagatccaagaaatacgttatcagatgaggaagaccttgaacaaaggcgcaaatacatttgcaaaatttgcgcaagaggattcactacatcgggtcatttagcaaggcataatagaattcatacgggcgaaaaaaatcattgttgtccgtataagggatgcacgcagcgattcagtcgacatgataattgcttgcaacactatagaacacatttgaaaaagggacaataa

SEQ ID NO: 232 - protein, 231 aa, Saccharomyces cerevisiae
MFYPYNYSNLNVSTMPALPGISAFDGMQDEENVEISPERKYQTLLPVLTNSHVVENELKHKLNKTAFDFRYQTKSENGSEKWEPKYLITPNLQTRSVSFDNSSVQYNSDSSEKSSLSQLTCNSSIIQQPENGIVSNDAYNKMANSRYSLKTRKQRTDPRNTLSDEEDLEQRRKYICKICARGFTTSGHLARHNRIHTGEKNHCCPYKGCTQRFSRHDNCLQHYRTHLKKGQ

SEQ ID NO: 233 - DNA, 3189 bp, Saccharomyces cerevisiae
atggtcgaaaatagtacgcagaaggccccacatgccggaaatgatgataatagctctaccaagccatattcggaggcgtttttcttagggttcaataacccaacgcctggattagaagctgagcactcaagcacatcgcctgcccccgagaactccgaaacacataataggaaaagaaatagaatattgtttgtctgccaggcttgttggaagtcaaaaacaaagtgtgatagagaaaaacctgaatgtggtcgatgcgtcaagcatgggttaaaatgtgtttatgacgtatcaaaacagccagcaccacgaattccgagtaaagacgccattatatcaaggttggaaaaagatatgttttattggaaagataaagctatgaagctactaacagagagagaggtgaatgaatcaggcaagagatcagcaagtccgatcaatacaaacaatgctagcggggacagtcctgataccaagaagcagcataaaatggaacctatatatgaacaaagtggtaacggggatataaacaatggtaccagaaatgatattgaaatcaacttgtatagaagtcatccaaccatgatcatgagtaaagtcatgaaaagagaagttaagccgttatctgaaaattatattataattcaggactgttttctaaaaatcctggtcacttcagtgttccttgacacttcaaagaacacgatgataccggcattgacggcaaacgcgaatattacaagagcccagcctagcgtagcaaataaccttttgaaattgaaggaaatgctaatcagacagtgtcaaaccgaagatgaaaaaaatcgtgtaaacgaattcactgatagaatactacaaaatacaaattcaaatagaaacttgaaaatcggtatgctattatcaatgctttacaattctgtcggttaccaatatctggaggatcattgccctcaaggtggcgaatattcggatttattgagaaatttgatcaatgaatgtgaagctattttgccatcttacgaaattattgaacgctacaagaaccacttttatgagtacgtttatccaagtctacctttcatcgaattagaaatttttgaagaatcattaagtcaaacaatttttccggacccaaacaacccctccaaggtgcaaatacgtatgggtagcacacatttgagagctaaggtggaaaacttgagtcttctattggttatcttgaaactctcatacatgtcaataaggtttttagatcatagtacagcagactcgagtttttatctttcaaaggaaataattgataaatacccaataccgaacgattttattttattgagtccaagatgtctagcatcggaaaattggtgtgcatgcgctaatgaaaacatcatatcatgtttactatatatctggtctttttttgctttttctcctgaagagggtgatttctttctcgagcaccccaccgatgttatcagtagtttgataatgatgctttccacctcgattggtctccacagagatccttcagatttccctcaattgatttccccgtccacctcagataaaagaaccttgaatcacagaagaatactctggttgagtatcgttaccgtttgttcgtttgaagcaagtctcaaaggtagacattctgtctcaccgatatctttaatggccttattcctaaatattaaggatcctgattctctgacggtatatatgaaccgagttaggggcgatctaagcgatatcaataatcacacacttttgagaattcataaatttacattcaagagagcccagcttgcgttactcctgtcggacttagataacttgacgatgacatactatggtagtttccatttgcattcaattgaattcataagagaaaagattgagatttttgtggaggaaaactttcccatagtaccattaaaaagtgtcgcacaggataagtcagaccttgatgacatgaatgtgatttcagaaatgaatatattatcttcagaaaattcttcttcatttcacaatcgaataatgaataaactattgatgttgagaacttcaatggccgtattcttgcattttgaaacacttatcactaaggataaaagtatcttcccattctacaagaaatactttatggttagctgtatggatgcgttgtcactaataaattatttcaataagtttttcaacggagaatatcgacacgcaatatcttctttaaccagttttaatgttacaaaatttattcagttagcactatccagcacaatcttcagcctattagggattatactaagaataggtttagccatccatatgttatcttctgaagtacaaaagttatcgggaacgacagatccaagaataaaggagttaaataccaaagtcgaaaaatttagtaccctgcaaagagatctcgagtctgctttagaaggtatatattgctctgcttcggaacatttaagattcacatacttccccgtttttaagatgttggctttattcgatgtcattgtacaaaggatgagaaagggtgaattatggcacggcatatttacgatgattcaaatggaacaaatgcattctaggataatcaagacattaagcattaccttaggagtcaaactggacaaaaaggataggctattagaggaattgatggcatgcaatcacgttgcgaattttagcgttgaagatatagatgagctgaaccgtaatatcaaaaaagagattcaaatttcttcaggattgaagccgcctgtaaacacaattgacttaaccaacggcgaaccattcggaaatgctgttcctaccttcacaaagacatggagttcatccttagataatttagaaaaactatcatcggccgctgcagttggtcagagcttggactacaacagtggtttacgtcagggtcctttggcgggtggtggttcaaaagagcaaacgccaatagccgggatgaataacttgaacaattcaatcaatgctacaccaattgtcgataactcatctggatcacaacttcctaatggtttcgatagaggccaagcgaataatactccttttccaggttattttggaggtttggatttatttgattatgactttttggtttgggcaatgactttgcttaaaaattttctttccaaactcctacctattcatttcatcaattaa

SEQ ID NO: 234 - protein, 1062 aa, Saccharomyces cerevisiae
MVENSTQKAPHAGNDDNSSTKPYSEAFFLGFNNPTPGLEAEHSSTSPAPENSETHNRKRNRILFVCQACWKSKTKCDREKPECGRCVKHGLKCVYDVSKQPAPRIPSKDAIISRLEKDMFYWKDKAMKLLTEREVNESGKRSASPINTNNASGDSPDTKKQHKMEPIYEQSGNGDINNGTRNDIEINLYRSHPTMIMSKVMKREVKPLSENYIIIQDCFLKILVTSVFLDTSKNTMIPALTANANITRAQPSVANNLLKLKEMLIRQCQTEDEKNRVNEFTDRILQNTNSNRNLKIGMLLSMLYNSVGYQYLEDHCPQGGEYSDLLRNLINECEAILPSYEIIERYKNHFYEYVYPSLPFIELEIFEESLSQTIFPDPNNPSKVQIRMGSTHLRAKVENLSLLLVILKLSYMSIRFLDHSTADSSFYLSKEIIDKYPIPNDFILLSPRCLASENWCACANENIISCLLYIWSFFAFSPEEGDFFLEHPTDVISSLIMMLSTSIGLHRDPSDFPQLISPSTSDKRTLNHRRILWLSIVTVCSFEASLKGRHSVSPISLMALFLNIKDPDSLTVYMNRVRGDLSDINNHTLLRIHKFTFKRAQLALLLSDLDNLTMTYYGSFHLHSIEFIREKIEIFVEENFPIVPLKSVAQDKSDLDDMNVISEMNILSSENSSSFHNRIMNKLLMLRTSMAVFLHFETLITKDKSIFPFYKKYFMVSCMDALSLINYFNKFFNGEYRHAISSLTSFNVTKFIQLALSSTIFSLLGIILRIGLAIHMLSSEVQKLSGTTDPRIKELNTKVEKFSTLQRDLESALEGIYCSASEHLRFTYFPVFKMLALFDVIVQRMRKGELWHGIFTMIQMEQMHSRIIKTLSITLGVKLDKKDRLLEELMACNHVANFSVEDIDELNRNIKKEIQISSGLKPPVNTIDLTNGEPFGNAVPTFTKTWSSSLDNLEKLSSAAAVGQSLDYNSGLRQGPLAGGGSKEQTPIAGMNNLNNSINATPIVDNSSGSQLPNGFDRGQANNTPFPGYFGGLDLFDYDFLVWAMTLLKNFLSKLLPIHFIN

SEQ ID NO: 235 - DNA, 1932 bp, Penicillium chrysogenum
atgacggagaaccacaccccttctactacgcagccgacgttgcctgcgcctgttgctgaagccgcgccgatccaagcaaacccggctccttctgcctcagtcacggcgactgctgccgccgctactgcggcggtgaacaacgccccctctatgaacggcgccggtgagcagttgccttgccagtgggttggttgcacggagaagtcccccactgccgagtctctatatgagcatgtttgcgagcgtcatgttggacgtaaaagcaccaacaacctcaacctgacctgccagtggggcacttgcaacaccacaacagtcaagcgtgatcatatcacctcccacatccgcgttcatgtgccacttaagccgcacaaatgcgacttttgtggtaaggctttcaagcgcccccaggatttgaagaagcatgtcaagactcatgcggacgactccgagatccgctcccccgaaccgggcatgaagcaccctgatatgatgttcccccaaaaccctaggggttcccctgctgccacacattacttcgaaagccctatcaacggcatcaatgggcaatattcacatgcaccgcctccccagtactaccagccacaccccccaccccaggctcccaacccgcattcctacggcaatctatactatgccctgagccaaggacaagagggaggccacccctacgaccgtaagcgcggatatgacgcgttgaacgaattttttggcgacttgaagcgccgccagttcgaccctaattcctatgccgcggtcggccagcgtctgctgggtctccaggcccttcagcttcccttcctcagtggccctgcccccgaataccagcaaatgcctgcgcctgttgccgttggcggcggcggtggtggttatggcggtggtgctccccagcctcctggttaccacctgccccccatgtccaatgttcggactaagaacgatttgatcaacattgatcagttcctcgaacaaatgcagaacactatctacgagagcgatgagaatgtggctgctgccggtgttgcccagcccggcgcgcattacgtgcacggtggcatgaatcatcgcaccacccactctcccccaacccactcccgccaagccacgttactgcaactaccttcagcccccatggcggctgctacagcgcactccccatcggtcggcaccccagccctgaccccaccttccagcgcacagtcgtatacctccaaccgctctcccatctccctgcacagctcacgcgtgtcgccccctcacgaggaggcggcgccgggtatgtaccctcgcttgcctgcggccatctgcgccgacagcatgactgcaggctatccgaccgcctcaggtgccgcaccaccctctactctgagcggtgcgtatgaccacgatgaccgccgccgctacactggtggtaccttgcaacgcgcccggccggccgagcgtgctgccaccgaggaccgcatggacatctcccaggatagcaaacatgatggcgagcgcactcccaaggctatgcacatctcggcgagcctgattgaccccgctctgtcgggtacctcatctgaccccgagcaggagtcagccaagcgtactgcggcaacggccactgaagtcgctgagcgggatgtcaacgttgcctgggttgaaaaggtccgtctgcttgagaacctccgccgcttggtttccggattgcttgaggccggtagccttactcctgaatatggagtgcagacatcctcggcttcgcctacgccaggacttgatgctatggagggagttgagactgccagtgtacgtgctgcttctgagcaggccagggaagagcccaagtctgaaagtgagggagtcttctatcccacgttacgtggtgtggatgaggatgaggatggagactctaaaatgcccgagtaa

SEQ ID NO: 236 - protein, 643 aa, Penicillium chrysogenum
MTENHTPSTTQPTLPAPVAEAAPIQANPAPSASVTATAAAATAAVNNAPSMNGAGEQLPCQWVGCTEKSPTAESLYEHVCERHVGRKSTNNLNLTCQWGTCNTTTVKRDHITSHIRVHVPLKPHKCDFCGKAFKRPQDLKKHVKTHADDSEIRSPEPGMKHPDMMFPQNPRGSPAATHYFESPINGINGQYSHAPPPQYYQPHPPPQAPNPHSYGNLYYALSQGQEGGHPYDRKRGYDALNEFFGDLKRRQFDPNSYAAVGQRLLGLQALQLPFLSGPAPEYQQMPAPVAVGGGGGGYGGGAPQPPGYHLPPMSNVRTKNDLINIDQFLEQMQNTIYESDENVAAAGVAQPGAHYVHGGMNHRTTHSPPTHSRQATLLQLPSAPMAAATAHSPSVGTPALTPPSSAQSYTSNRSPISLHSSRVSPPHEEAAPGMYPRLPAAICADSMTAGYPTASGAAPPSTLSGAYDHDDRRRYTGGTLQRARPAERAATEDRMDISQDSKHDGERTPKAMHISASLIDPALSGTSSDPEQESAKRTAATATEVAERDVNVAWVEKVRLLENLRRLVSGLLEAGSLTPEYGVQTSSASPTPGLDAMEGVETASVRAASEQAREEPKSESEGVFYPTLRGVDEDEDGDSKMPE

SEQ ID NO: 237 - DNA, 2007 bp, Saccharomyces cerevisiae
atggaagacaagtttgctaacctcagtctccatgagaaaactggtaagtcatctatccaattaaacgagcaaacaggctcagataatggctctgctgtcaagagaacatcttcgacgtcctcgcactacaataacatcaacgctgaccttcatgctcgtgtaaaagcttttcaagaacaacgtgcattgaaaaggtctgccagcgtgggcagtaatcaaagcgagcaagacaaaggcagttcacaatcacctaaacatattcagcagattgttaataagccattgccgcctcttcccgtagcaggaagttctaaggtttcacaaagaatgagtagccaagtcgtgcaagcgtcctccaagagcactcttaagaacgttctggacaatcaagaaacacaaaacattaccgacgtaaatattaacatcgatacaaccaaaattaccgccacaacaattggtgtaaatactggcctacctgctactgacattacgccgtcagtttctaatactgcatcagcaacacataaggcgcaattgctgaatcctaacagaagggcaccaagaaggccgctttctacccagcaccctacaagaccaaatgttgccccgcataaggcccctgctataatcaacacaccaaaacaaagtttaagtgcccgtcgagcggtcaaattaccaccaggaggaatgtcattaaaaatgcccactaaaacagctcaacagccgcagcagtttgccccaagcccttcaaacaaaaaacatatagaaaccttatcaaacagcaaagttgttgaagggaaaagatcgaatccgggttctttgataaatggtgtgcaaagcacatccacctcatcaagtaccgaaggcccacatgacactgtaggcactacacccagaactggaaacagcaacaactcttcaaattctggtagtagtggtggtggtggtcttttcgcaaatttctcgaaatacgtggatatcaaatccggctctttgaattttgcaggcaaactatcgctatcctctaaaggaatagatttcagcaatggttctagttcgagaattacattggacgaactagaatttttggatgaactgggtcatggtaactatggtaacgtctcaaaggtactgcataagcccacaaatgttattatggcgacgaaggaagtccgtttggagctagatgaggctaaatttagacaaattttaatggaactagaagttttgcataaatgcaattctccctatattgtggatttttatggtgcattctttattgagggcgccgtctacatgtgtatggaatacatggatggtggttccttggataaaatatacgacgaatcatctgaaatcggcggcattgatgaacctcagctagcgtttattgccaatgctgtcattcatggactaaaagaactcaaagagcagcataatatcatacacagagatgtcaaaccaacaaatattttatgttcagccaaccaaggcaccgtaaagctgtgcgatttcggtgtttctggtaatttggtggcatctttagcgaagactaatattggttgtcagtcatacatggcacctgaacgaatcaaatcgttgaatccagatagagccacctataccgtacagtcagacatctggtctttaggtttaagcattctggaaatggcactaggtagatatccgtatccaccagaaacatacgacaacattttctctcaattgagcgctattgttgatgggccgccaccgagattaccttcagataaattcagttctgacgcacaagattttgtttctttatgtctacaaaagattccggaaagaagacctacatacgcagctttaacagagcatccttggttagtaaaatacagaaaccaggatgtccacatgagtgagtatatcactgaacgattagaaaggcgcaacaaaatcttacgggaacgtggtgagaatggtttatctaaaaatgtaccggcattacatatgggtggtttatag

SEQ ID NO: 238 - protein, 668 aa, Saccharomyces cerevisiae
MEDKFANLSLHEKTGKSSIQLNEQTGSDNGSAVKRTSSTSSHYNNINADLHARVKAFQEQRALKRSASVGSNQSEQDKGSSQSPKHIQQIVNKPLPPLPVAGSSKVSQRMSSQVVQASSKSTLKNVLDNQETQNITDVNINIDTTKITATTIGVNTGLPATDITPSVSNTASATHKAQLLNPNRRAPRRPLSTQHPTRPNVAPHKAPAIINTPKQSLSARRAVKLPPGGMSLKMPTKTAQQPQQFAPSPSNKKHIETLSNSKVVEGKRSNPGSLINGVQSTSTSSSTEGPHDTVGTTPRTGNSNNSSNSGSSGGGGLFANFSKYVDIKSGSLNFAGKLSLSSKGIDFSNGSSSRITLDELEFLDELGHGNYGNVSKVLHKPTNVIMATKEVRLELDEAKFRQILMELEVLHKCNSPYIVDFYGAFFIEGAVYMCMEYMDGGSLDKIYDESSEIGGIDEPQLAFIANAVIHGLKELKEQHNIIHRDVKPTNILCSANQGTVKLCDFGVSGNLVASLAKTNIGCQSYMAPERIKSLNPDRATYTVQSDIWSLGLSILEMALGRYPYPPETYDNIFSQLSAIVDGPPPRLPSDKFSSDAQDFVSLCLQKIPERRPTYAALTEHPWLVKYRNQDVHMSEYITERLERRNKILRERGENGLSKNVPALHMGGL

SEQ ID NO: 239 - DNA, 1581 bp, Saccharomyces cerevisiae
atgtccaccctttttctgattggaatacacgagattgagaaatctcaaacaattgtacagaatgaacactattttgatagagtgattgagcttcaagatttggattctctgatggtagcattgtataaggacagagtttcgccttttccaaacgtccataactttgaaacgggcgtatctatagttctttatgacccttcaaaatttcaattatctgtgcgacaattggatgttctattcaagcgatttttcccatctttcaatatttctgcgatagatcatacacgagaggaaaacctgcaacgtcttgaatgtgttgagcgtgaaaatagcatctgtcgtaatagaataacgagaattaaccactggatgtatcaccatcatgatgatactccagacggtattaacaaaaacagctatggtactgtaaatgggaattctgtccccactcaagcatgtgaagcaaacatttacactttattattgcatttgaatgattccaaggcacaacatttacgaaaggcatcagtgccaaggctaattcgcaacatcgagtttatgtcttttttgtcagatccaatagaaaaaatttctcaagagggatcacattattggaacattctatcaacttgggacttttgtgctttatcattaagcactcaagaattgatttggtgcgggttcacgcttatcaaaaagttatctaaggatgcaaaagtactcattgcagataataagttactgctactactatttactttagaatcatcctatcatcaagttaacaaatttcacaattttaggcatgccatcgatgtcatgcaagccacatggcgattgtgtacatatcttcttaaagataatcctgtacaaacattactgttgtgtatggctgccataggtcatgatgtcggtcatcctgggactaacaatcaactattgtgcaactgtgaatcagaggttgctcaaaatttcaaaaatgtctctatcttggagaattttcacagggaattatttcaacaattgctatcagagcattggcctcaattgctatctatctccaaaaaaaaatttgattttatttccgaggctattctggccacagatatggcattgcattctcagtatgaggatagattaatgcatgaaaacccaatgaaacaaatcactttgatatctctaattattaaagctgcagacatctctaatgtgacgagaaccttgtcaatatcagcacgttgggcatacctcattactctcgaatttaatgattgcgctcttttggaaacatttcataaagctcaccgcccagaacaagactgttttggcgattcatacaagaatgttgattctccgaaagaagatttggaatcaattcaaaatattttggtgaacgtaacagaccctgatgatattatcaaagaccatccgcatattccaaacggtcaaatatttttcattaatacgtttgctgaagtatttttcaacgcattaagtcaaaaattctcaggattaaaatttttaagcgataatgtcaaaatcaataaagaatactggatgaaacacaagaaaccacaatag

SEQ ID NO: 240 - protein, 526 aa, Saccharomyces cerevisiae
MSTLFLIGIHEIEKSQTIVQNEHYFDRVIELQDLDSLMVALYKDRVSPFPNVHNFETGVSIVLYDPSKFQLSVRQLDVLFKRFFPSFNISAIDHTREENLQRLECVERENSICRNRITRINHWMYHHHDDTPDGINKNSYGTVNGNSVPTQACEANIYTLLLHLNDSKAQHLRKASVPRLIRNIEFMSFLSDPIEKISQEGSHYWNILSTWDFCALSLSTQELIWCGFTLIKKLSKDAKVLIADNKLLLLLFTLESSYHQVNKFHNFRHAIDVMQATWRLCTYLLKDNPVQTLLLCMAAIGHDVGHPGTNNQLLCNCESEVAQNFKNVSILENFHRELFQQLLSEHWPQLLSISKKKFDFISEAILATDMALHSQYEDRLMHENPMKQITLISLIIKAADISNVTRTLSISARWAYLITLEFNDCALLETFHKAHRPEQDCFGDSYKNVDSPKEDLESIQNILVNVTDPDDIIKDHPHIPNGQIFFINTFAEVFFNALSQKFSGLKFLSDNVKINKEYWMKHKKPQ

SEQ ID NO: 241 - DNA, 3207 bp, Saccharomyces cerevisiae
atgcgaggcttgacacctaagaacggtgtacatattgagacgggtccggatacagaatcgtccgcggactccagcaacttttctacaggtttcagcggcaagattcgtaagccaaggtcgaaagtaagtaaagcgtgcgataactgtagaaaaagaaagataaaatgtaatgggaagtttccctgcgcaagctgtgagatatattcatgtgagtgcacgttcagcactagacaaggtggcgctcgaataaaaaaccttcacaagacgagtttggaaggtacaaccgtacaagtcaaagaggaaacagattccagttcgacttctttttctaatcctcagcgatgtacagacgggccatgcgcagtggaacaaccaacgaaattttttgagaatttcaagctaggtggtcgtagtagtggtgataatagcggaagtgatgggaagaatgacgacgatgtgaatagaaacggtttttatgaagacgatagcgaatcacaggcaactttgacatctctacaaaccactctgaaaaatttgaaggagatggctcatttaggtacacatgtaacctcagccatcgagagcattgaacttcagataagtgacttgcttaagcgatgggaacccaaagtgaggaccaaagaattagcaacaacgaaattttaccctaataaatcaatagaaactcaattgatgaaaaacaaatactgtgatgtggtacatttgacaagatatgccgcttggtcaaacaataagaaggaccaagatacttctagtcaacctttgatcgacgaaatctttggtttgtactctcctttccaatttttgtcacttcaaggtattggtaaatgtttccaaaattatagatccaaatccaaatgcgagatttttcccaggaccgccaaggaaaccatatacatcatgttaaggtttttcgacgtttgttttcatcacatcaaccaaggctgtgtctccatagctaatcccctggaaaactacctacagaaaatgaatcttttaccttcaaccccatcttcgatatcatctgcagggagcccgaatacagcacacacaaaatcgcatgttgcgttagtgataaatcacttaccgcagccctttgtgagaaatataaccggaataagtaattctgagctactaagcgaaatgaataatgatatcagcatgtttggcattttattgaagatgttggatatgcataaaaattcctaccagaacttcctaatggaaatcacatctaacccctccgtggctaaaaacacgcagtcaattgatgtcttgcaggaattcatccattattgtcaagctggagaggcgctaatcgccttatgttacagctattataattctacattatacaactacgtggacttcacatgcgacataacgcatttagagcaacttctatactttttggatctgctattttggctatcggaaatatacggttttgaaaaagtcttgaacgtagcagttcattttgtttcaagagttggtttatcaaggtgggaattttacgtgggtcttgatgaaaactttgctgaaagaagaagaaatctctggtggaaagctttctatttcgagaaaactttagcctctaaacttggctatccttcgaacattgatgactccaaaatcaattgtttattacctaagaattttcgagatgttgggttcttggataatagagattttatcgagaacgtccacttagttcgcaggagcgaagcttttgacaacatgtgcatatccgacttaaaatactatggcgaattagctgtcttacaaatagtcagccatttctcatcatctgttttattcaatgaaaaattcacgtcaattaggaatacatcaaaaccatctgttgttagagagaaactactcttcgaggtactcgagatttttaacgaaacagaaatgaaatatgatgctatcaaagagcaaactggaaaattgttcgatattgcattctctaaagatagtactgaactcaaagtttcaagagaggataagattatggcttcaaaatttgttctattttacgagcaccatttctgcagaatggttaacgaatctgataatattgtcgccagattatgcgtgcacagaaggccctcaatactaattgaaaacttgaaaatataccttcacaagatttacaaatcatggaccgatatgaacaaaatcttattagactttgacaacgattattccgtataccgttcgttcgcccattattctatcagttgcattattttggtatcacaagcattctcagtggccgaattcattaaagtaaatgacgttgtgaatatgattagagtcttcaaaagatttttggatataaaaattttttccgaaaatgagaccaatgagcatgtcttcaacagccaaagctttaaagactatacaagagctttttctttcctgacaatcgtcactcgtatcatgcttttggcatacggagagtcctctagcaccaacctcgatgttatctccaaatatattgatgagaatgcgccagatttaaaaggtataatagaacttgtcttggatacaaactcttgcgcttatcgatttttattagaacctgttcagaagtcaggattccatttaacggtctcacaaatgttgaaaaatagaaagtttcaggaaccactaatgtcaaatgaagataataagcagatgaagcataattcgggaaaaaatttgaatccggatctcccaagtcttaagacgggcacttcatgcttactaaatggcattgaatcgcctcaattgccattcaatggtcgctcagcaccttccccagtgagaaacaactcactaccggagtttgcacaattgccttcatttaggtcattatccgtgtctgatatgatcaatcccgattacgcgcaaccaacaaatgggcaaaataatacgcaagtccaatctaataaaccaatcaatgctcagcagcaaatacccacttcagtacaagtaccatttatgaacacaaatgaaatcaataacaacaacaacaacaacaacaacaataaaaacaatattaacaatattaacaacaacaacagtaacaatttttctgcaactagttttaatttggggacactagatgaatttgttaataacggtgatcttgaggacctctacagtatcctgtggagcgacgtttatccagatagttaa

SEQ ID NO: 242 - protein, 1068 aa, Saccharomyces cerevisiae
MRGLTPKNGVHIETGPDTESSADSSNFSTGFSGKIRKPRSKVSKACDNCRKRKIKCNGKFPCASCEIYSCECTFSTRQGGARIKNLHKTSLEGTTVQVKEETDSSSTSFSNPQRCTDGPCAVEQPTKFFENFKLGGRSSGDNSGSDGKNDDDVNRNGFYEDDSESQATLTSLQTTLKNLKEMAHLGTHVTSAIESIELQISDLLKRWEPKVRTKELATTKFYPNKSIETQLMKNKYCDVVHLTRYAAWSNNKKDQDTSSQPLIDEIFGLYSPFQFLSLQGIGKCFQNYRSKSKCEIFPRTAKETIYIMLRFFDVCFHHINQGCVSIANPLENYLQKMNLLPSTPSSISSAGSPNTAHTKSHVALVINHLPQPFVRNITGISNSELLSEMNNDISMFGILLKMLDMHKNSYQNFLMEITSNPSVAKNTQSIDVLQEFIHYCQAGEALIALCYSYYNSTLYNYVDFTCDITHLEQLLYFLDLLFWLSEIYGFEKVLNVAVHFVSRVGLSRWEFYVGLDENFAERRRNLWWKAFYFEKTLASKLGYPSNIDDSKINCLLPKNFRDVGFLDNRDFIENVHLVRRSEAFDNMCISDLKYYGELAVLQIVSHFSSSVLFNEKFTSIRNTSKPSVVREKLLFEVLEIFNETEMKYDAIKEQTGKLFDIAFSKDSTELKVSREDKIMASKFVLFYEHHFCRMVNESDNIVARLCVHRRPSILIENLKIYLHKIYKSWTDMNKILLDFDNDYSVYRSFAHYSISCIILVSQAFSVAEFIKVNDVVNMIRVFKRFLDIKIFSENETNEHVFNSQSFKDYTRAFSFLTIVTRIMLLAYGESSSTNLDVISKYIDENAPDLKGIIELVLDTNSCAYRFLLEPVQKSGFHLTVSQMLKNRKFQEPLMSNEDNKQMKHNSGKNLNPDLPSLKTGTSCLLNGIESPQLPFNGRSAPSPVRNNSLPEFAQLPSFRSLSVSDMINPDYAQPTNGQNNTQVQSNKPINAQQQIPTSVQVPFMNTNEINNNNNNNNNNKNNINNINNNNSNNFSATSFNLGTLDEFVNNGDLEDLYSILWSDVYPDS

SEQ ID NO: 243 - DNA, 4695 bp, Saccharomyces cerevisiae
atgttgcaagcgccctcaagttcaaactcgggtttgaatcaaggaaatgctgcgccggacggcccacctaacgaaacacagccgtacgaaggcctcgacgcggcagctcaagaagaaataaaagaattggcaagaacgctgacgagccaatcttcccttttatcgcaagaaaagcgtattaccggcactggcgacccgaatacactaactgctgcttcttcatcgtcattgagccggtcaattttcgctagtgatatcaagggagttaacccaatccttttggacgtcaatgatccagactacgatgagacattggatcctcgatcagaaaatttctcgagtgtcagatgggtacgaaatatggcacaaatatgcgagaatgattcggatttctataaaccgttttcattaggttgcgcctggaaagatttgagtgcctccggtgattctgccgatataacatatcagggaacatttggtaatatgcccatcaaatacttgaaaatgagttggaggtgcatatcccgacgtcttttccaccggacacatggcaagagtgaagataatgactccggtttccaaattttgaagccgatggacggatgcatcaatccgggggaactacttgttgtgcttggacgacccggtgcaggatgtactacgctgctgaaatctatatctgtaaatacacacggattcaagatttctccggacacaatcatcacgtacaatggattctccaacaaagagatcaaaaaccattaccgtggtgaagtggtctacaatgcagaatcagacattcacatcccgcacttgacagtattccaaactttatacacagtggcaagactgaagacaccaaggaaccgaatcaagggtgtcgatagggacacatttgccaaacacatgactgaagtggcaatggcaacttacggactgagccacactgcagatacaaaagtgggtaatgattttgttcgtggtgtatccgggggagaaaggaaaagagtttccattgctgaagtgtctatatgtggctcgaagtttcagtgctgggataatgccacgaggggcttagattctgctaccgcgctggagttcatcaaggccttgaaaacgcaagccactatcacaaagtctgcagccactgtggccatttaccaatgttctaaagatgcctatgatttgttcgataaagtctgtgttctttacgatggttaccaaatcttctttggcccaagtaagcaggccaaaaagtactttcaaagaatgggatatgtgtgtcccgaaaggcagaccacagcagattatttgacctctattactagtccttctgaaagaattaaggacaaagacatggtcaaacatggaattatgatcccacaaacggcctatgaaatgaaccagtactggattcaatcagaggaatacaaacaattacaggtgcaggtgaacaaacatttagatacagactcttcccagcaaagagaacaaataaaaaatgcacatattgccaaacaatctaagagagcacggccctcctctccttatacagtaagtttctttttgcaagttaagtatattctaatcagggatatatggaggattaagaatgacccaagtattcaacttttcacggttttgagtcatgcagcaatggctcttatcttgggatcaatgttttatgaagtcatgctttccactaccacaacaaccttttattaccgaggcgcggctattttttttgctattctgttcaatgcgttctcatcacttttagagatcttttcactctatgagacgaggcccattaccgaaaagcacaagacttactcgttatatcgcccaagtgctgatgccttcgcctctacattttctgatgttccaacaaaattagccacggcagtaactttcaacataccatattattttttaatcaatctaaaaagagatgccggtgcttttttcttttactttttaataaacattataacagtttttgctatgtcgcatttgttcagatgcattggctcagtgtcgaaaactttacctcaggcaatggttcccgcatctgttcttctgttagcttttgcaatgtacactgggtttgccatcccaagagtccaaatgcttggctggtcaaaatggatttcttatatcaacccattgtcttacctttttgaatcgctaatgattaacgaatttcatggtagaaatttcccatgtgctcagtatatacctagtgggccaaattatgtcaacgcaacaggtgacgaagtcacctgctccgccctcggttctatcccaggaaataattatgtaagtggtgatgatttcattcaaacgaactacggctatcgacataagaacaaatggcggtctgttggtattggtttagcatacattatttttttcttatttctgtatttattcttttgtgaatacaatgaaggagcaaagcaaaatggtgagatgttagtatttccccatagtgtggttaaaaagatgaagaagaagggtattgtctctgagaagaaaaagaaaaaccaaccaacgttgtcaacatctgatgctgagaaagatgtagagatgaacaacaattcaagtgcgactgattcaagatttttacgcgattctgatgcagctataatgggtaacgataaaactgtcgccaaggagcattattcatctccttcatcttctgcgtctcaaagcaatagttttagtaaaagtgatgacattgaattgtccaaatcacaagcgatttttcattggaaaaacttatgctacgatatcccgattaagaatgggaagaggagaattttggataatgttgatggttgggtcaagcctggtacactaactgccttgattggcgcatctggtgcaggaaaaacaacgttattagattgtcttgccgagagaaccacgatgggtttaatcactggtgatgtattcgtagatggtagaccgcgggaccagtctttccccagatcaattggttattgtcagcagcaggatttgcatttgaaaaccgcaactgtgagagagtcattaaggttttccgcgtacctgcgtcaagccgatgatgtatccatcgaggagaaagataaatacgttgaagaagtcattgaggtattggagatgaaactttatgctgatgccatagtaggcgttcctggtgaaggtttaaatgtggaacaaagaaaaaggttaaccataggtgtggagttagctgccaaaccaaaactgttggtatttttagatgagcccacgtctgggcttgattcccaaactgcatggtcaacttgtcaattaatgaagaaattggctagtcgcggacaagcaattttatgtaccattcatcaaccttctgctctcttaatgcaagagtttgataggttactatttttgcaagagggcggacaaactgtatattttggagagctagggaaaggttgcaaaacaatgattaactatttcgaagctcatggtgcccataaatgcccaccagatgccaatccagccgaatggatgttagaaatagtaggtgctgcaccaggaactcacgctagtcaagattattttgccatttggagagattctgaagaatatagggaaatgcagaaagagttggactggatggaacgagaattgcctaaacggacggaaggttcgtcaaatgaggagcagaaggagttcgctacgtcaactttgtaccagatcaaattggtgagttatcgattattccatcaatattggagaacaccattttacttatggtcaaaatttttttcaacaattgtgtctgaactcttcataggcttcacttttttcaaggcgaatacatcattacagggcctacagaatcaaatgctggccatttttatgtttacagtggtattcaacccaatattgcaacaatatttaccacttttcgttcagcagagggaactttatgaagctagagaaaggccatcaagaaccttttcgtggaaagcatttattgtatcgcagattctcgtggaaatcccttggaatttactggccggtactatagcttttttcgtctattattatcctgttggattttacagaaatgcttcttatgcaaatcaacttcatgaacgaggagctttattttggttatttgcgtgcgcgttttacgtctacatcagttcaatgggggtattagtgatttcatgcattgaaattgcagaaaatgctgcgaatctcgcttcacttttctttataatgtcattatctttctgcggtgttctggctacgccaaatattctaccaagattctggatttttatgtatagagtatcgccactgacatacctcattgatgctctgctatcggtaggactggccaatgctagtgtcgtttgttccagcaacgaacttttaaaaattgttcctccaagcggtatgacatgctcggaatatatggaaccttatatgcaatccaccgggacgggttatctgctcgatgggagttccgaaactgaatgtcacttttgtcaattcagttctaccaatgattatctggcgactgtgagttcttcgtattcacgtagatggatgaactatggcatttttagtgcatatattgtctttgactattgtgcagcaatatttttatactggctggtgcgggttccaaagaaaagcaaaaaattaaagaaataa

SEQ ID NO: 244 - protein, 1564 aa, Saccharomyces cerevisiae
MLQAPSSSNSGLNQGNAAPDGPPNETQPYEGLDAAAQEEIKELARTLTSQSSLLSQEKRITGTGDPNTLTAASSSSLSRSIFASDIKGVNPILLDVNDPDYDETLDPRSENFSSVRWVRNMAQICENDSDFYKPFSLGCAWKDLSASGDSADITYQGTFGNMPIKYLKMSWRCISRRLFHRTHGKSEDNDSGFQILKPMDGCINPGELLVVLGRPGAGCTTLLKSISVNTHGFKISPDTIITYNGFSNKEIKNHYRGEVVYNAESDIHIPHLTVFQTLYTVARLKTPRNRIKGVDRDTFAKHMTEVAMATYGLSHTADTKVGNDFVRGVSGGERKRVSIAEVSICGSKFQCWDNATRGLDSATALEFIKALKTQATITKSAATVAIYQCSKDAYDLFDKVCVLYDGYQIFFGPSKQAKKYFQRMGYVCPERQTTADYLTSITSPSERIKDKDMVKHGIMIPQTAYEMNQYWIQSEEYKQLQVQVNKHLDTDSSQQREQIKNAHIAKQSKRARPSSPYTVSFFLQVKYILIRDIWRIKNDPSIQLFTVLSHAAMALILGSMFYEVMLSTTTTTFYYRGAAIFFAILFNAFSSLLEIFSLYETRPITEKHKTYSLYRPSADAFASTFSDVPTKLATAVTFNIPYYFLINLKRDAGAFFFYFLINIITVFAMSHLFRCIGSVSKTLPQAMVPASVLLLAFAMYTGFAIPRVQMLGWSKWISYINPLSYLFESLMINEFHGRNFPCAQYIPSGPNYVNATGDEVTCSALGSIPGNNYVSGDDFIQTNYGYRHKNKWRSVGIGLAYIIFFLFLYLFFCEYNEGAKQNGEMLVFPHSVVKKMKKKGIVSEKKKKNQPTLSTSDAEKDVEMNNNSSATDSRFLRDSDAAIMGNDKTVAKEHYSSPSSSASQSNSFSKSDDIELSKSQAIFHWKNLCYDIPIKNGKRRILDNVDGWVKPGTLTALIGASGAGKTTLLDCLAERTTMGLITGDVFVDGRPRDQSFPRSIGYCQQQDLHLKTATVRESLRFSAYLRQADDVSIEEKDKYVEEVIEVLEMKLYADAIVGVPGEGLNVEQRKRLTIGVELAAKPKLLVFLDEPTSGLDSQTAWSTCQLMKKLASRGQAILCTIHQPSALLMQEFDRLLFLQEGGQTVYFGELGKGCKTMINYFEAHGAHKCPPDANPAEWMLEIVGAAPGTHASQDYFAIWRDSEEYREMQKELDWMERELPKRTEGSSNEEQKEFATSTLYQIKLVSYRLFHQYWRTPFYLWSKFFSTIVSELFIGFTFFKANTSLQGLQNQMLAIFMFTVVFNPILQQYLPLFVQQRELYEARERPSRTFSWKAFIVSQILVEIPWNLLAGTIAFFVYYYPVGFYRNASYANQLHERGALFWLFACAFYVYISSMGVLVISCIEIAENAANLASLFFIMSLSFCGVLATPNILPRFWIFMYRVSPLTYLIDALLSVGLANASVVCSSNELLKIVPPSGMTCSEYMEPYMQSTGTGYLLDGSSETECHFCQFSSTNDYLATVSSSYSRRWMNYGIFSAYIVFDYCAAIFLYWLVRVPKKSKKLKK

SEQ ID NO: 245 - DNA, 1719 bp, Saccharomyces cerevisiae
atgaagtacatggtagtcagctcgcctatacaagaggttttaagattacataaatatattgagatctctactaccacaatcacagttaaaattacaaataagatgtcctctccagtgattggtatcacctttggtaacacctcttcttctattgcctacatcaacccaaagaacgatgttgatgtcattgccaacccagatggtgagcgtgccattccatccgctttatcctatgtcggtgaagatgaataccacggtggtcaagctttgcaacaattaatcagaaatcctaagaatactatcattaacttccgtgacttcattggtttgccatttgacaagtgtgatgtcagcaagtgcgctaacggtgccccagctgtcgaagttgatggcaaagttggatttgttatttcaagaggcgaaggtaaggaagaaaaacttactgtagatgaagtggtctccagacatttaaacagattaaagttagccgcggaagattacatcggttctgccgtaaaggaagctgtattgacagttccaacaaacttcagtgaagaacaaaagactgcactaaaggcttctgccgccaaaattggtctgcaaattgttcaattcatcaatgaaccttctgctgctttattagcccacgctgaacaattcccatttgaaaaagatgttaacgttgttgttgctgacttcggtggtattagatctgacgctgctgtcattgccgttcgtaacggtattttcactattttggccactgctcatgacctcagcttaggtggtgacaatttggatactgaattagtcgaatattttgctagtgagttccaaaagaagtatcaagccaatccaagaaagaacgctagatccttggccaagttaaaggctaactcttcaattaccaagaagactttgtccaacgcaacttctgccactatttccatcgattccttagctgatggtttcgactatcacgcttctatcaacagaatgaggtacgaattggtagctaacaaggtcttcgcccaattttcctctttcgttgattctgtcattgccaaggctgaattagacccattggacatcgatgctgttcttttgactggtggtgtatcatttactccaaaattaaccactaacttggaatacactttaccagaatcagtcgaaattcttggtccacagaacaagaacgcttctaacaatccaaacgaattagctgcatccggtgccgcattacaagcaagattgattagcgattacgatgctgacgaattggctgaagctttacaaccagttatcgtcaatactccacatttaaagaagcctattggtttgattggtgctaagggcgaattccacccagtattgttggctgaaacttcgttccctgtacaaaagaaattgactttgaaacaagccaagggtgatttcttgattggtgtttacgaaggtgaccatcacatcgaggaaaagactttggagccaattccaaaagaagaaaatgctgaagaggacgatgaaagtgaatggtccgacgatgaacctgaagtcgtcagagaaaaactatacactttgggtaccaagttgatggaattgggaattaaaaacgctaacggtgttgaaattatctttaacattaacaaagacggtgctttaagagtcaccgctagagatttgaaaactggtaatgctgtaaagggtgaattatag

SEQ ID NO: 246 - protein, 572 aa, Saccharomyces cerevisiae
MKYMVVSSPIQEVLRLHKYIEISTTTITVKITNKMSSPVIGITFGNTSSSIAYINPKNDVDVIANPDGERAIPSALSYVGEDEYHGGQALQQLIRNPKNTIINFRDFIGLPFDKCDVSKCANGAPAVEVDGKVGFVISRGEGKEEKLTVDEVVSRHLNRLKLAAEDYIGSAVKEAVLTVPTNFSEEQKTALKASAAKIGLQIVQFINEPSAALLAHAEQFPFEKDVNVVVADFGGIRSDAAVIAVRNGIFTILATAHDLSLGGDNLDTELVEYFASEFQKKYQANPRKNARSLAKLKANSSITKKTLSNATSATISIDSLADGFDYHASINRMRYELVANKVFAQFSSFVDSVIAKAELDPLDIDAVLLTGGVSFTPKLTTNLEYTLPESVEILGPQNKNASNNPNELAASGAALQARLISDYDADELAEALQPVIVNTPHLKKPIGLIGAKGEFHPVLLAETSFPVQKKLTLKQAKGDFLIGVYEGDHHIEEKTLEPIPKEENAEEDDESEWSDDEPEVVREKLYTLGTKLMELGIKNANGVEIIFNINKDGALRVTARDLKTGNAVKGEL

SEQ ID NO: 247 - DNA, 2931 bp, Saccharomyces cerevisiae
atgaaagtgaagaaatcaactagatcaaaagtttcgacagcatgtgtcaattgcagaaaaaggaaaatcaaatgcacaggtaaatatccatgtaccaactgcatttcttacgattgtacgtgtgtattcctaaaaaaacatttaccgcagaaggaggatagttcccagtctttgcctactacagctgttgctccaccctcttcccacgccaatgtagaggcttcagcagatgtacagcatctggacactgcgattaagctagataatcaatattacttcaaactgatgaacgacctgatacagactccagtctctccgagtgcgacgcatgctcctgatacttccaataatcctactaatgataataatattctctttaaagatgattccaaatatcaaaatcaactggttacgtatcaaaatattctgacaaatttgtacgctctgccgccttgtgatgacactcagctcttgattgataaaacgaagtcgcagttgaataacctgattaacagttggaatcccgaaataaactaccccaagctttccagtttctctcctcgcccacaaagatcgatagaaacgtatcttttaaccaacaagtatagaaataaaatacacatgacgaggttctccttttggacagaccaaatggttaaatcacaaagtccagattcatttctagccaccactccactagtagatgaagtatttggtcttttctctccaatacaggctttttcactaagaggtataggatatttaattaaaaaaaatatcgaaaacacgggttcatcgatgttaatagatacaaaggaaactatttatctaatattaagattgtttgatttgtgttatgaacatttgatccaaggttgcatctctatttctaatccattagagaactatcttcaaaaaataaagcaaactcctactacgacggcatctgctagtttgcctacttccccagcacctttatctaacgatttagtcatttctgttattcatcaactacctcagccatttatacaatcgattaccgggtttacgactactcaattgatagaaaatttacatgattcattttcgatgtttcgaatagttactcaaatgtatgctcaacataggaagcgctttgcggaatttttaaaccaagctttctccttgccccatcaagaaaagagtgttttattctcgtcattctgctcatcagaatatcttctatctactctttgttacgcatactacaatgttaccctatatcacatgttggacataaacactttagattacctagagattttagtgtcattgctagaaatccaaaatgaaattgatgagcgttttggatttgaaaaaatgctagaagttgcggttacatgctccactaagatgggattgtctcgttgggagtattatgttggaatagacgaaaatactgccgaacggagaagaaaaatatggtggaaaatatacagtctggaaaagcgttttttaactgatcttggtgatttatccttaataaatgaacatcaaatgaattgtctcttgccgaaggatttcagggacatgggattcattaaccataaagaatttttaacgaaaattggtacgtcctctttatcaccgtcatcgcccaagctaaaaaacttgtcattgtccaggcttattgaatatggtgagttagcgatagcccaaattgttggagattttttttcagagactctttataatgagaaattcacgtctttagaagtatccgttaaacccacaattatcagacaaaagttattggagaaagtttttgaggacattgaatcttttaggttaaaattggccaaaataaagcttcacacctcaagagtttttcaagtagctcactgcaaatatccagaatatccaaaaaacgatctaattgaagcagctaaatttgtaagttaccataaaaatacatggttctccatcttgggtgctgttaacaatcttattgctaggctatctgaagatccagaggtgataactgagcaaagcatgaaatatgcgaatgaaatgtttcaagaatggagggaaattaatcaattcttaatacaggttgatactgattttattgtttgggcatgtttggacttttatgaactgatatttttcgtgatggcttcaaaattttatgtggaagacccgcacatcactttagaggatgttatcaacactttgaaagtttttaagagaataactaacattatttctttttttaataataatttggacgagaaggattatgattgtcaaactttcagggagttttcgagaagttcgagtttggttgccatatccataagaatcatatttttaaaatactgctatgccgaacaaattgatagagccgaattcatcgaacgtttgaaagaagttgaaccgggtctaagtgaccttttgcgtgagttttttgatacccgctcttttatttacaggtacatgttgaaatccgttgaaaaatcaggctttcatttaataattagaaaaatgttagaaagcgactataaatttttgtatagagacaaattggccactggtaatattccagaccaaggaaattcaagccaaatttctcagttgtatgacagtactgctccttcatacaacaatgcttctgcctcagcagcaaactcaccgttgaagttatcgtctttgttgaactctggagaggaatcgtacactcaagacgcatcagaaaatgttccatgtaatctgcggcatcaagatcgatcgttacaacagacaaaaagacaacattctgcgcctagccaaataagcgctaatgagaataatatatacaacttgggtactttagaggagtttgtcagcagtggtgacctgactgatttatatcatactctgtggaatgacaatacttcatatcccttcttatga

SEQ ID NO: 248 - protein, 976 aa, Saccharomyces cerevisiae
MKVKKSTRSKVSTACVNCRKRKIKCTGKYPCTNCISYDCTCVFLKKHLPQKEDSSQSLPTTAVAPPSSHANVEASADVQHLDTAIKLDNQYYFKLMNDLIQTPVSPSATHAPDTSNNPTNDNNILFKDDSKYQNQLVTYQNILTNLYALPPCDDTQLLIDKTKSQLNNLINSWNPEINYPKLSSFSPRPQRSIETYLLTNKYRNKIHMTRFSFWTDQMVKSQSPDSFLATTPLVDEVFGLFSPIQAFSLRGIGYLIKKNIENTGSSMLIDTKETIYLILRLFDLCYEHLIQGCISISNPLENYLQKIKQTPTTTASASLPTSPAPLSNDLVISVIHQLPQPFIQSITGFTTTQLIENLHDSFSMFRIVTQMYAQHRKRFAEFLNQAFSLPHQEKSVLFSSFCSSEYLLSTLCYAYYNVTLYHMLDINTLDYLEILVSLLEIQNEIDERFGFEKMLEVAVTCSTKMGLSRWEYYVGIDENTAERRRKIWWKIYSLEKRFLTDLGDLSLINEHQMNCLLPKDFRDMGFINHKEFLTKIGTSSLSPSSPKLKNLSLSRLIEYGELAIAQIVGDFFSETLYNEKFTSLEVSVKPTIIRQKLLEKVFEDIESFRLKLAKIKLHTSRVFQVAHCKYPEYPKNDLIEAAKFVSYHKNTWFSILGAVNNLIARLSEDPEVITEQSMKYANEMFQEWREINQFLIQVDTDFIVWACLDFYELIFFVMASKFYVEDPHITLEDVINTLKVFKRITNIISFFNNNLDEKDYDCQTFREFSRSSSLVAISIRIIFLKYCYAEQIDRAEFIERLKEVEPGLSDLLREFFDTRSFIYRYMLKSVEKSGFHLIIRKMLESDYKFLYRDKLATGNIPDQGNSSQISQLYDSTAPSYNNASASAANSPLKLSSLLNSGEESYTQDASENVPCNLRHQDRSLQQTKRQHSAPSQISANENNIYNLGTLEEFVSSGDLTDLYHTLWNDNTSYPFL

SEQ ID NO: 249 - DNA, 4536 bp, Saccharomyces cerevisiae
atgcccgaggccaagcttaacaataacgtcaacgacgttactagctactcctccgcgtcttcttctactgaaaacgctgctgatctacacaattataatgggttcgatgagcatacagaagctcgaatccaaaaactggcaaggactctgaccgcacagagtatgcaaaactccactcaatcggcacccaacaaaagtgatgctcagtctatattttctagcggtgtggaaggtgtaaacccgatattctctgatcctgaagctccaggctatgacccaaaattggaccccaactccgaaaatttttctagtgccgcctgggttaagaatatggctcacctaagtgcggcagaccctgacttttataagccttattccttaggttgcgcttggaagaacttaagtgcttctggtgcttccgcagatgtcgcctatcagtcaactgtggttaatattccatacaaaatcctaaaaagtgggctgagaaagtttcaacgttctaaagaaaccaatactttccaaatcttgaaaccaatggatggttgcctaaacccaggtgaattgctagtcgttttaggtagaccaggctctggctgtactactttattaaaatccatctcttcaaatactcatggttttgatcttggtgcagatactaaaatttcttacagcggctactcaggtgatgatattaagaaacattttcgtggtgaagttgtttacaacgcagaagctgatgtacatctgcctcatttaacagtcttcgaaactttggttacagtagcgaggttgaaaaccccacagaaccgtatcaagggtgtcgatagggaaagttatgcgaatcatttggcggaagtagcaatggcaacgtacggtttatcgcatacaaggaatacaaaagttggtaacgacatcgtcagaggtgtttccggtggtgaaaggaagcgtgtctccattgctgaagtctccatctgtggatccaaatttcaatgctgggataatgctacaaggggtttggattccgctaccgctttggaatttattcgtgccttaaagactcaagctgatatttccaatacatctgccacagtggccatctatcaatgttctcaagatgcgtacgacttgttcaataaagtctgtgttttggatgatggttatcagatctactatggccccgccgataaggccaagaagtactttgaagatatggggtatgtttgtccaagcagacaaaccaccgcagattttttgacctcagttacaagtccctctgagagaaccctgaacaaagatatgctaaaaaaaggtattcatataccacagaccccgaaggaaatgaacgattactgggtaaaatctccaaattacaaagagctaatgaaagaagtcgaccaacgattattgaatgacgatgaagcaagccgtgaagctattaaggaagcccacattgctaagcagtccaagagagcaagaccttcctctccttatactgtcagctacatgatgcaagttaaatacctattaatcagaaatatgtggagactgcgaaataatatcgggtttacattatttatgattttgggtaactgtagtatggctttaatcttgggttcaatgtttttcaagatcatgaaaaagggtgatacttctacattctatttccgtggttctgctatgttttttgcaattctattcaatgcattttcttctctgttagaaatcttttcgttatatgaggccagaccaatcactgaaaaacatagaacatattcgttataccatccaagtgctgacgcttttgcatcagttctatcagaaataccctcaaagttaatcatcgctgtttgcttcaatataatcttctatttcttagtagactttagaagaaatggtggtgtattctttttctacttattaataaacattgtcgcggttttctccatgtctcacttgtttagatgtgttggttccttaacaaagacattgtcagaagctatggttcccgcttctatgttattgttggctctatccatgtataccggttttgctattcctaagaagaagatcctacgttggtctaaatggatttggtatatcaatccgttggcttacttattcgaatctttgttaattaacgagtttcatggtataaaattcccctgcgctgaatatgttcctcgtggtcctgcgtatgcaaacatttctagtacagaatctgtttgtaccgtggttggagctgttccaggccaagactatgttctgggtgatgatttcattagaggaacttatcaatactaccacaaagacaaatggcgtggtttcggtattggtatggcttatgtcgtcttctttttctttgtctatctattcttatgtgaatacaacgagggtgctaaacaaaaaggtgaaatattagttttcccacgcagtatagttaaaagaatgaagaaaagaggtgtactaactgaaaagaatgcaaatgaccccgaaaacgttggggaacgtagtgacttatccagcgataggaaaatgctacaagaaagctctgaagaggaatccgatacttacggagaaattggtttatccaagtcagaggctatatttcactggagaaacctttgttacgaagttcagattaaggccgaaacaagacgtattttgaacaatgttgatggttgggttaaaccaggtactttaacagctttaatgggtgcttcaggtgctggtaaaaccacacttctggattgtttggccgaaagggttaccatgggtgttataactggtgatatcttggtcaatggtattccccgtgataaatctttcccaagatccattggttattgtcagcaacaagatttgcatttgaaaactgccactgtgagggagtcattgagattttctgcttacctacgtcaaccagctgaagtttccattgaagaaaagaacagatatgttgaagaagttattaaaattcttgaaatggaaaaatatgctgatgctgttgttggtgttgctggtgaaggtttaaacgttgaacaaagaaaaagattaaccattggtgttgaattaactgccaaaccaaaactgttggtctttttagatgaacctacttctggtttggattctcaaactgcttggtctatttgtcagctaatgaaaaagttggcaaatcatggtcaagcaattctatgtactattcaccaaccctctgctattttgatgcaagaattcgatcgtttactatttatgcaacgtggtggtaagactgtctactttggcgacttgggcgaaggttgtaaaactatgatcgattattttgaaagccatggtgctcataaatgccctgctgacgccaacccagctgaatggatgctagaagttgttggtgcagctccaggctctcatgcaaatcaagattattacgaagtttggaggaattctgaagagtacagggccgttcaatctgaattagattggatggaaagagaattaccaaagaaaggttcgataactgcagctgaggacaaacacgaattttcacaatcaattatttatcaaacaaaattggtcagtattcgtctattccagcaatattggagatctccagattatttatggtcgaagtttattttaactattttcaatcaattgttcatcggtttcactttcttcaaagcaggaacctcgctacagggtttacaaaatcaaatgttggctgtgttcatgtttacggttattttcaatcctattctacaacaatacctaccatcttttgtccagcaaagagatttgtatgaggccagggaacgcccctcaaggactttttcttggatttcatttatcttcgctcaaatattcgtggaagttccatggaatatattggcaggtactattgcttattttatctactattatccaattggattttactccaacgcgtctgcagctggccagttgcatgaaaggggtgctttattttggttgttctcttgtgctttctacgtttatgttggttctatgggtctgcttgtcatttcattcaaccaagttgcagaaagtgcagctaacttagcctctttgttgtttacaatgtctttgtctttttgtggtgttatgactaccccaagtgccatgcctagattttggatattcatgtacagggtttcacctttgacttatttcattcaggctctgttggctgttggtgttgctaacgtagacgtcaaatgcgctgattacgaattgctagaattcacaccaccatccggtatgacatgtgggcagtacatggaaccatatttacaactagcaaagactggttacttaactgatgaaaatgccactgacacctgtagtttctgtcaaatatctacaaccaatgattacttagctaatgtcaattctttctacagtgagagatggagaaattatggtatcttcatctgttatattgcattcaattatatcgctggtgtctttttctactggttagcaagagtgcctaaaaagaacggtaaactctccaagaaataa

SEQ ID NO: 250 - protein, 1511 aa, Saccharomyces cerevisiae
MPEAKLNNNVNDVTSYSSASSSTENAADLHNYNGFDEHTEARIQKLARTLTAQSMQNSTQSAPNKSDAQSIFSSGVEGVNPIFSDPEAPGYDPKLDPNSENFSSAAWVKNMAHLSAADPDFYKPYSLGCAWKNLSASGASADVAYQSTVVNIPYKILKSGLRKFQRSKETNTFQILKPMDGCLNPGELLVVLGRPGSGCTTLLKSISSNTHGFDLGADTKISYSGYSGDDIKKHFRGEVVYNAEADVHLPHLTVFETLVTVARLKTPQNRIKGVDRESYANHLAEVAMATYGLSHTRNTKVGNDIVRGVSGGERKRVSIAEVSICGSKFQCWDNATRGLDSATALEFIRALKTQADISNTSATVAIYQCSQDAYDLFNKVCVLDDGYQIYYGPADKAKKYFEDMGYVCPSRQTTADFLTSVTSPSERTLNKDMLKKGIHIPQTPKEMNDYWVKSPNYKELMKEVDQRLLNDDEASREAIKEAHIAKQSKRARPSSPYTVSYMMQVKYLLIRNMWRLRNNIGFTLFMILGNCSMALILGSMFFKIMKKGDTSTFYFRGSAMFFAILFNAFSSLLEIFSLYEARPITEKHRTYSLYHPSADAFASVLSEIPSKLIIAVCFNIIFYFLVDFRRNGGVFFFYLLINIVAVFSMSHLFRCVGSLTKTLSEAMVPASMLLLALSMYTGFAIPKKKILRWSKWIWYINPLAYLFESLLINEFHGIKFPCAEYVPRGPAYANISSTESVCTVVGAVPGQDYVLGDDFIRGTYQYYHKDKWRGFGIGMAYVVFFFFVYLFLCEYNEGAKQKGEILVFPRSIVKRMKKRGVLTEKNANDPENVGERSDLSSDRKMLQESSEEESDTYGEIGLSKSEAIFHWRNLCYEVQIKAETRRILNNVDGWVKPGTLTALMGASGAGKTTLLDCLAERVTMGVITGDILVNGIPRDKSFPRSIGYCQQQDLHLKTATVRESLRFSAYLRQPAEVSIEEKNRYVEEVIKILEMEKYADAVVGVAGEGLNVEQRKRLTIGVELTAKPKLLVFLDEPTSGLDSQTAWSICQLMKKLANHGQAILCTIHQPSAILMQEFDRLLFMQRGGKTVYFGDLGEGCKTMIDYFESHGAHKCPADANPAEWMLEVVGAAPGSHANQDYYEVWRNSEEYRAVQSELDWMERELPKKGSITAAEDKHEFSQSIIYQTKLVSIRLFQQYWRSPDYLWSKFILTIFNQLFIGFTFFKAGTSLQGLQNQMLAVFMFTVIFNPILQQYLPSFVQQRDLYEARERPSRTFSWISFIFAQIFVEVPWNILAGTIAYFIYYYPIGFYSNASAAGQLHERGALFWLFSCAFYVYVGSMGLLVISFNQVAESAANLASLLFTMSLSFCGVMTTPSAMPRFWIFMYRVSPLTYFIQALLAVGVANVDVKCADYELLEFTPPSGMTCGQYMEPYLQLAKTGYLTDENATDTCSFCQISTTNDYLANVNSFYSERWRNYGIFICYIAFNYIAGVFFYWLARVPKKNGKLSKK

SEQ ID NO: 251 - DNA, 957 bp, Saccharomyces cerevisiae
atgtcttccaacgcccaagtcaaaaccccattacctccagccccagctccaaagaaggaatctaactttttgattgatttcttaatgggtggtgtcagtgccgctgtcgccaaaactgctgcatctcccatcgaaagagttaaacttttgatccaaaaccaagatgaaatgttaaaacaaggtactttggacagaaaatacgcaggtatcttagactgtttcaagagaaccgctacacaggaaggtgttatctcattctggagaggtaacactgctaacgttatccgttatttccccactcaagctttgaatttcgccttcaaggacaagatcaaggccatgtttggtttcaagaaggaagaaggttacgccaaatggtttgccggtaacttggcatctggtggtgctgctggtgccttgtcattactatttgtttactctttggattatgcaagaactagattggctgctgactccaagtcctctaaaaagggtggtgctcgtcaattcaacggtttgatcgatgtctacaagaagaccttaaaatctgatggtgttgctggtctttacagaggtttcttaccttctgtcgttggtattgttgtctacagaggtctatacttcggtatgtacgattctttgaagcctctattgttgactggttctttggaaggttcattcttggcttcattcttgttgggttgggttgttactactggtgcttctacatgttcttacccattggataccgttagaagaagaatgatgatgacctccggtcaagctgttaagtacgacggtgcctttgactgtttgaggaagattgttgctgctgaaggtgttggttctctattcaagggttgtggtgctaacatcttaagaggtgtcgcaggtgctggtgttatctcaatgtacgaccaactgcaaatgatcttgtttggtaagaagttcaaataa

SEQ ID NO: 252 - protein, 318 aa, Saccharomyces cerevisiae
MSSNAQVKTPLPPAPAPKKESNFLIDFLMGGVSAAVAKTAASPIERVKLLIQNQDEMLKQGTLDRKYAGILDCFKRTATQEGVISFWRGNTANVIRYFPTQALNFAFKDKIKAMFGFKKEEGYAKWFAGNLASGGAAGALSLLFVYSLDYARTRLAADSKSSKKGGARQFNGLIDVYKKTLKSDGVAGLYRGFLPSVVGIVVYRGLYFGMYDSLKPLLLTGSLEGSFLASFLLGWVVTTGASTCSYPLDTVRRRMMMTSGQAVKYDGAFDCLRKIVAAEGVGSLFKGCGANILRGVAGAGVISMYDQLQMILFGKKFK

SEQ ID NO: 253 - DNA, 1101 bp, Saccharomyces cerevisiae
atgtaccatgttcctgaaatgaggctacattaccccctggtgaacactcaatctaacgccgcaataacacccaccagaagttacgacaatacccttccttcgtttaacgagctatcacaccagagtacaatcaatcttccattcgtccaacgcgaaactccaaacgcatatgctaatgttgcccaattagctacgtcgccaactcaggctaaatcagggtattattgtcgctattatgctgtgccttttcccacatatccacaacaaccacaatctccatatcaacaagctgtacttccttatgccaccattcccaacagcaatttccaaccatcttctttccctgtgatggcagtgatgcctccagaggttcaatttgatggatcattcttgaacaccttacatcctcacacagagttgcctccaatcattcaaaacactaatgatactagcgtcgcacgtccaaataaccttaaatcaatagcagcagcgtcaccaacagtgacagcaacaacaagaacacctggcgtcagttcaacgtcagttctcaaaccacgcgttataactacgatgtgggaagatgagaatactatctgctaccaagtagaggcgaacggtatatcagtcgtgcgtagggctgacaacaacatgattaacggcaccaagttgttgaatgtcacgaagatgacaagggggagaagggatggaatattaagatccgagaaggttagggaagtcgtgaagattggctccatgcacctcaagggtgtttggattcctttcgaaagggcttatatcctggctcaacgtgaacagattctagatcatctgtacccgctcttcgtcaaagatatagaatccattgttgatgccagaaagcccagcaacaaggcatctttgacccccaaatctagccctgcccccatcaagcaagaaccatctgataataaacacgaaattgctactgaaattaagccgaagagtattgatgctttatcgaatggagcatctactcagggtgctggcgaactgccccacttaaaaatcaaccatatcgatactgaggcccaaacaagtagagcaaaaaatgaattatcataa

SEQ ID NO: 254 - protein, 366 aa, Saccharomyces cerevisiae
MYHVPEMRLHYPLVNTQSNAAITPTRSYDNTLPSFNELSHQSTINLPFVQRETPNAYANVAQLATSPTQAKSGYYCRYYAVPFPTYPQQPQSPYQQAVLPYATIPNSNFQPSSFPVMAVMPPEVQFDGSFLNTLHPHTELPPIIQNTNDTSVARPNNLKSIAAASPTVTATTRTPGVSSTSVLKPRVITTMWEDENTICYQVEANGISVVRRADNNMINGTKLLNVTKMTRGRRDGILRSEKVREVVKIGSMHLKGVWIPFERAYILAQREQILDHLYPLFVKDIESIVDARKPSNKASLTPKSSPAPIKQEPSDNKHEIATEIKPKSIDALSNGASTQGAGELPHLKINHIDTEAQTSRAKNELS

SEQ ID NO: 255 - DNA, 1680 bp, Saccharomyces cerevisiae
atgatggaagaattctcgtacgatcacgattttaacacacattttgctacagatttggattatttgcaacatgaccaacaacaacaacaacagcaacaacatgatcaacaacataatcaacagcaacaaccacaaccacaaccaattcaaactcaaaacctggagcacgaccacgaccaacatactaatgatatgagtgcttcatcgaatgcatcagatagtggacctcaaaggcccaagaggactcgcgcaaagggtgaagcactagatgtgctaaagcgtaaatttgaaataaatccaacaccctctttggtagaaagaaagaaaatatcagatctgataggaatgcctgaaaaaaacgtcagaatttggtttcagaacagaagagctaaattgaggaaaaagcagcatggaagtaataaggacacaatcccctcgtcacaatcccgtgatattgccaacgattacgatcgtgggagtacagacaacaatttggtcactacaacaagtacttcatccatatttcacgatgaagacctgacttttttcgaccgtattccgctgaacagcaacaacaactattatttttttgacatttgctcaattactgtgggaagttggaatagaatgaaaagcggcgcactgcaaagaaggaactttcagtctataaaggagttgagaaacctatcgccaataaagattaataacataatgtcgaatgccacagatttaatggttttgatatccaagaaaaactcagaaataaactatttttttagtgccatggcaaataatactaaaattctcttcaggatctttttcccattaagttcagtcacgaattgctctctaactttagaaactgacgacgatataataaatagtaacaacacaagcgataaaaacaatagtaatactaataatgatgatgataacgacgataacagtaatgaagacaatgataatagtagtgaggataagaggaatgctaaggataactttggagaattgaagctaacagtcaccagatcacccacttttgctgtttactttttaaataatgctcctgatgaagatccaaatttgaacaatcagtggtccatatgtgatgatttctcagaaggtagacaggtaaatgacgcatttgttggtggttcgaatattcctcacactttgaaaggtttacagaaatcattaagattcatgaattctctaattctagactataaatcatcgaatgaaatattacctacgatcaatacagcgatccccactgctgcagttccacaacagaatattgcccctccctttctgaatacaaattcaagtgcaacagactcaaatccaaatacaaatttagaagattctctcttcttcgatcatgatctgttatcgagttcgataaccaacaccaacaacggacaaggctctaataatggacgtcaagctagcaaggatgatacgctcaatttactggatactaccgtcaacagcaataacaatcataatgctaataatgaggagaatcatctagcgcaagaacatttatccaacgatgctgatattgttgcaaatccaaatgatcatttgttgtctttaccgactgatagtgaactcccaaatactccagattttttgaagaacactaacgaactaactgacgagcatagatggatatga

SEQ ID NO: 256 - protein, 559 aa, Saccharomyces cerevisiae
MMEEFSYDHDFNTHFATDLDYLQHDQQQQQQQQHDQQHNQQQQPQPQPIQTQNLEHDHDQHTNDMSASSNASDSGPQRPKRTRAKGEALDVLKRKFEINPTPSLVERKKISDLIGMPEKNVRIWFQNRRAKLRKKQHGSNKDTIPSSQSRDIANDYDRGSTDNNLVTTTSTSSIFHDEDLTFFDRIPLNSNNNYYFFDICSITVGSWNRMKSGALQRRNFQSIKELRNLSPIKINNIMSNATDLMVLISKKNSEINYFFSAMANNTKILFRIFFPLSSVTNCSLTLETDDDIINSNNTSDKNNSNTNNDDDNDDNSNEDNDNSSEDKRNAKDNFGELKLTVTRSPTFAVYFLNNAPDEDPNLNNQWSICDDFSEGRQVNDAFVGGSNIPHTLKGLQKSLRFMNSLILDYKSSNEILPTINTAIPTAAVPQQNIAPPFLNTNSSATDSNPNTNLEDSLFFDHDLLSSSITNTNNGQGSNNGRQASKDDTLNLLDTTVNSNNNHNANNEENHLAQEHLSNDADIVANPNDHLLSLPTDSELPNTPDFLKNTNELTDEHRWI

SEQ ID NO: 257 - DNA, 993 bp, Saccharomyces cerevisiae
atgagttcaccagcgaacctattccctggattaaacgacataactgacgtgctggaggaattcccactggccacctccagatatttaacattactacacgaaatagatgcaaaatgtgtgcattctatgccgaatttgaacgagaggatagataagttcttgaagaaagacttcaataaagatcaccaaacacaagtaagactgctcaataatatcaacaagatttatgaagaactgatgccatcgctggaggagaaaatgcatgtctcatccattatgctggataatctagacagattgacgtcccggttagaattggcgtatgaagtcgcaatcaagaacacagaaattcctagaggtttaagactgggtgtggacaaccatccagcaatgcacctccatcatgaactaatggaaaaaatagagagcaaatcaaacagcaaatcgtcgcaggcactgaagagcgaatcaagaagagaagccatggctgccaacaggaggcagggcgaacattactccgccagcacacaccaacaagacgactcaaagaacgacgcaaactacggaggcagcaggcacgagagccaagaccacactggtaacaacacaaactcaagaaaaagagccaacgctgccaataccaacaacgccgatccagagaccaaaaaacgcaagaggagagttgccaccacagccgtttcaccaagcactatcagcacggcaactgccgtcaataatggcaggataggtacatctacagcgtccaggggagttagcagcgtcggaaacagcaacaacagcaggatatcaagaccaaaaaccaacgactacggcgaaccgctctactgctactgtaaccaagtggcatacggggaaatggtggggtgtgatggcgcagactgtgagctagaatggttccatttgccatgtattggactcgaaactctacctaagggcaagtggtattgcgacgactgcaaaaaaaaactgtga

SEQ ID NO: 258 - protein, 330 aa, Saccharomyces cerevisiae
MSSPANLFPGLNDITDVLEEFPLATSRYLTLLHEIDAKCVHSMPNLNERIDKFLKKDFNKDHQTQVRLLNNINKIYEELMPSLEEKMHVSSIMLDNLDRLTSRLELAYEVAIKNTEIPRGLRLGVDNHPAMHLHHELMEKIESKSNSKSSQALKSESRREAMAANRRQGEHYSASTHQQDDSKNDANYGGSRHESQDHTGNNTNSRKRANAANTNNADPETKKRKRRVATTAVSPSTISTATAVNNGRIGTSTASRGVSSVGNSNNSRISRPKTNDYGEPLYCYCNQVAYGEMVGCDGADCELEWFHLPCIGLETLPKGKWYCDDCKKKL

SEQ ID NO: 259 - DNA, 939 bp, Saccharomyces cerevisiae
atgggccgtacaacttctgagggaatacacggttttgtggacgatctagagcccaagagcagcattcttgataaagtcggagactttatcaccgtaaacacgaaacggcatgatgggcgcgaggacttcaacgagcaaaacgacgagctgaacagtcaagagaaccacaacagcagtgagaatgggaacgagaatgaaaatgaacaagacagtctcgcgttggacgacctagaccgcgcctttgagctggtggaaggtatggatatggactggatgatgccctcgcatgcgcaccactccccagctacaactgctacaatcaagccgcggctattatattcgccgctaatacacacgcaaagtgcggttcccgtaaccatttcgccgaacttggtcgctactgctacttccaccacatccgctaacaaagtcactaaaaacaagagtaatagtagtccgtatttgaacaagcgcagaggtaaacccgggccggattcggccacttcgctgttcgaattgcccgacagcgttatcccaactccgaaaccgaaaccgaaaccaaagcaatatccgaaagttattctgccgtcgaacagcacaagacgcgtatcaccggtcacggccaagaccagcagcagcgcagaaggcgtggtcgtagcaagtgagtctcctgtaatcgcgccgcacggatcgagccattcgcggtcgctgagtaagcgacggtcatcgggcgcgctcgtggacgatgacaagcgcgaatcacacaagcatgcagagcaagcacggcgtaatcgattagcggtcgcgctgcacgaactggcgtctttaatccccgcggagtggaaacagcaaaatgtgtcggccgcgccgtccaaagcgaccaccgtggaggcggcctgccggtacatccgtcacctacagcagaacgtgagcacgtga

SEQ ID NO: 260 - protein, 312 aa, Saccharomyces cerevisiae
MGRTTSEGIHGFVDDLEPKSSILDKVGDFITVNTKRHDGREDFNEQNDELNSQENHNSSENGNENENEQDSLALDDLDRAFELVEGMDMDWMMPSHAHHSPATTATIKPRLLYSPLIHTQSAVPVTISPNLVATATSTTSANKVTKNKSNSSPYLNKRRGKPGPDSATSLFELPDSVIPTPKPKPKPKQYPKVILPSNSTRRVSPVTAKTSSSAEGVVVASESPVIAPHGSSHSRSLSKRRSSGALVDDDKRESHKHAEQARRNRLAVALHELASLIPAEWKQQNVSAAPSKATTVEAACRYIRHLQQNVST

SEQ ID NO: 261 - DNA, 918 bp, Saccharomyces cerevisiae
atgtcttcttcttcacaatttaagcagttagaaaagcttggcaatggtacgtatgccacagtgtacaagggactgaacaaaaccacaggggtatatgttgccctgaaagaggtaaaactggattcagaggaaggtacaccctctacggccatccgtgagatctccctaatgaaagaattgaaacatgagaacattgttagactttatgacgttattcacacagagaacaagttgactttggtttttgaattcatggacaacgatttaaagaaatacatggattcccgcaccgtgggcaacacaccaagagggctagaactaaacttggttaaatacttccagtggcaactactgcaagggctggccttttgccatgaaaacaagattctccaccgtgatttaaaacctcaaaacctattaatcaacaagagaggccagttgaaattgggtgatttcggtctggcccgtgctttcggtattccggtcaacacattttcaagcgaagtcgtaacgttgtggtaccgtgctcctgatgtgctaatgggttctaggacgtactccacatccattgatatatggtcgtgtgggtgcattcttgcggaaatgataacgggtaagcctttgtttcctggcaccaacgacgaagaacaactgaaattgatcttcgacatcatgggcactcctaatgagtccctatggcccagtgtaacaaagttacccaaatacaacccaaatatccagcaacgaccaccaagagacctacgtcaagtattgcaaccacacaccaaagaaccgctagacgggaatctcatggatttcttacacggactcttgcaacttaatccggatatgaggctgagcgccaagcaggctctgcatcacccttggtttgcagagtactaccaccacgcttcataa

SEQ ID NO: 262 - protein, 305 aa, Saccharomyces cerevisiae
MSSSSQFKQLEKLGNGTYATVYKGLNKTTGVYVALKEVKLDSEEGTPSTAIREISLMKELKHENIVRLYDVIHTENKLTLVFEFMDNDLKKYMDSRTVGNTPRGLELNLVKYFQWQLLQGLAFCHENKILHRDLKPQNLLINKRGQLKLGDFGLARAFGIPVNTFSSEVVTLWYRAPDVLMGSRTYSTSIDIWSCGCILAEMITGKPLFPGTNDEEQLKLIFDIMGTPNESLWPSVTKLPKYNPNIQQRPPRDLRQVLQPHTKEPLDGNLMDFLHGLLQLNPDMRLSAKQALHHPWFAEYYHHAS

SEQ ID NO: 263 - DNA, 1239 bp, Aspergillus nidulans
atgtcgaactactcgcattcaagcaataatcccttccttaaggtgtcaacgaaagaggataaaccctcgtcgtttcataaaatcgcagaggacgaagagtacgaggtgacgtcaccaaccgatgcaacctttcgagcctccaagaatgccgacaactcagctggtggaaataacccgctcgagagtggtcgagctggagaatcgggcgatggaatacgctttggaagagacccctttggtaatttccagggtggtgcggaaggccaggacgagtcctccatcgaccctaatggcttccgccctacgggtggccccgatcatggctttcccaacaattacgccctgggccgtcgaacatccgtatctgctgaatctctgaaccctacatccgcgggatcagacagctggaccccgccgagccacccgaaatctgaagaacagctcgcccggttgaagacagctgtcagcaacaacttcctcttttcccacctggatgacgagcagtccaggacggtactagatgctttggttgagaaacctatacccgcaaaagatattaaagtgatctcccaaggggatgccggcgactatttctacattgttgaagagggccatttcgacgtttatatcaatccctctggctccgtgcaaccgggcccagacggggctggcaccaagatcagcacgatcggccctggcggctcgtttggagagctggctctaatgtacaacgcgccgcgagcggcaaccattgtatcgacagagcctaaaagcactctatgggctttagaccgtataaccttccgacgcattctcatggactcggcattccagcgacgacgcatgtatgaggctttcttggaagaagtcccgctcctgtccagtctcaaaccttacgagcgggcaaagatcgcggacgctctcgacacaatcaagtttccggccggggaatatatcattaaagaaggtgatccgggagacgccttttacctgcttgaatccggcgaggccgaggcttttatggagggcgtcgaagaacccgtgaagtcatacaaaaggggagattacttcggtgaactggctctactagacgacaaacctagagcagccagcgttcgcgcgaagacggaggtcaaggtcgccaagcttggtagagatggattcaaacgtctgttgggcccggtggaaaacatcatgagaaggacggaatactcgtcgaggccatctacagctacataa

SEQ ID NO: 264 - protein, 412 aa, Aspergillus nidulans
MSNYSHSSNNPFLKVSTKEDKPSSFHKIAEDEEYEVTSPTDATFRASKNADNSAGGNNPLESGRAGESGDGIRFGRDPFGNFQGGAEGQDESSIDPNGFRPTGGPDHGFPNNYALGRRTSVSAESLNPTSAGSDSWTPPSHPKSEEQLARLKTAVSNNFLFSHLDDEQSRTVLDALVEKPIPAKDIKVISQGDAGDYFYIVEEGHFDVYINPSGSVQPGPDGAGTKISTIGPGGSFGELALMYNAPRAATIVSTEPKSTLWALDRITFRRILMDSAFQRRRMYEAFLEEVPLLSSLKPYERAKIADALDTIKFPAGEYIIKEGDPGDAFYLLESGEAEAFMEGVEEPVKSYKRGDYFGELALLDDKPRAASVRAKTEVKVAKLGRDGFKRLLGPVENIMRRTEYSSRPSTAT

SEQ ID NO: 265 - DNA, 3456 bp, Saccharomyces cerevisiae
atgagtttttcacaattggagcagaacattaaaaaaaagatagccgtcgaagaaaatattattcggggagcttctgccctcaagaaaaagactagcaatgttatggtcattcagaaatgtaatacgaatattagagaggcacgtcaaaatcttgagtacttggaggatagcttaaaaaaattacggttgaagaccgctcaacaaagtcagggtgaaaatggcagcgaagataatgagcgattcaattcgaaggaatacgggtttctttctaccaaatcgccaaatgaacacatattttctcgtttggatttagtaaaatatgattgcccttctttggcgcaaagaatccaatacatgttgcaacaattagaattcaaattacaggtggaaaagcaataccaagaagccaatactaaattgactaaattgtatcaaattgacggtgatcaacgtagtagttctgcggcagaagggggtgctatggaatccaaatacaggattcaaatgcttaacaaagctttgaagaaataccaagctattaacgttgactttgatcaatttaaacaccaacccaatgacataatggataatcaacaaccgaaattccgaagaaaacaactgactggcgttctaacaattggaataactgctgctagagatgttgaccatatacaatcaccgatgtttgccaggaagccagagagctacgttactataaaaatcgatgatacgatcaaagccagaacgaagccttctagaaatgacaggtggagtgaagattttcaaattccagttgaaaaagggaatgaaatcgagattactgtatatgataaggtgaacgactcgctcattccagtggctataatgtggttactgctttccgatatcgctgaagaaattcgtaagaagaaagccggacaaacaaatgaacaacaaggatgggtcaacgcttcaaacattaatggtggttcttctctcgctagcgaagagggaagcacattgacttctacatactcaaactcagccattcagtctacttcagcaaagaatgtgcaaggcgaaaatacatcaactagtcaaatcagtacgaattcatggtttgtcttagaaccatccgggcagattttgttaacactaggattccacaagtcttctcaaatagaaaggaagcagttgatgggtggactacatcgtcatggtgctattatcaataggaaagaagagatattcgaacagcatggccaccactttgtacaaaaatcattttacaacattatgtgctgtgcatattgtggtgatttccttcggtatactgggttccaatgtcaagattgtaaatttttatgtcacaaaaaatgttacaccaatgttgttactaagtgtattgctaaaacttctactgatacggatccggacgaggcaaagttgaaccaccgtattcctcatagattcctgcctacttcaaaccgtggtactaaatggtgctgtcactgtggttatattttaccatggggtagacataaagtacgcaaatgttctgaatgtggtataatgtgtcatgctcaatgtgctcatttggttcccgatttctgtggcatgtcgatggaaatggctaataaaattctgaaaacgattcaagacacaaaacgtaatcaagagaaaaagaagaggacagttccgtcggcacagttggggtcatctattggtactgccaatggtagtgatctttccccatccaaattagctgaaagggcaaacgctcctttgcctcctcagccaagaaaacatgataaaactccttcgcctcagaaggtaggaagagattctccaactaagcagcatgatcctattattgataaaaaaatttcactacaaacgcacgggcgtgagaaactaaataaatttatcgatgaaaatgaggcctatttaaattttacagaaggtgcacaacaaaccgccgaattttcatcaccagagaaaacactggatccaacgtcgaatagacgttccttgggactcactgatttatctattgagcatagtcaaacttgggaatctaaagatgatttaatgagagatgaacttgaactgtggaaagcacaacgtgaggaaatggaacttgaaataaaacaagatagtggggaaatccaagaggatctagaagttgatcacattgatttagagaccaaacagaaactagactgggagaacaaaaatgatttccgtgaagctgatttgacaatagattccacacacacaaatccattccgcgatatgaatagtgaaacctttcaaattgaacaagaccatgcttcaaaggaagtactacaagaaacagtgtccttggctcctacaagtactcatccctccagaaccactgatcaacaatctccgcagaaatcacaaaccagcacaagcgcaaagcataaaaagagagcggctaaacgtcgtaaggtttcattagataatttcgtattactcaaagttcttggtaaaggtaattttggtaaagttattttatctaaatcaaagaatactgacaggctttgtgccataaaagttctgaagaaagataatattattcaaaatcatgacatcgagagtgcaagagcagaaaagaaagtatttttgttagccacaaaaactaaacacccattcttaaccaatctatactgctcttttcaaactgaaaaccgtatatattttgctatggagtttattgggggcggtgacttaatgtggcatgttcaaaaccaaagactatctgtaagaagggccaaattttatgccgccgaggtcttactggctctgaaatattttcatgataatggtgtaatataccgtgatttgaagttggaaaacattctattaactccagaaggtcatataaaaattgccgattatggtttgtgtaaagatgaaatgtggtatggtaatagaacttctacattttgtggcacaccagaatttatggctccagaaattttaaaagagcaagaatataccaaagctgtcgattggtgggcatttggggtgctgctatatcaaatgctactgtgccaatctccattctcaggagatgacgaagatgaagtttttaacgctatccttaccgatgaacccttatacccaatagatatggcaggtgagattgtacaaatattccaaggcctattaacaaaagatcctgaaaagaggttgggtgctggtcccagggacgcagacgaagttatggaagaacctttcttccgtaacatcaactttgacgatatcttaaaccttcgcgtgaaaccaccctacatcccagaaattaaatctccggaagatacatcatatttcgagcaagaattcacctctgcgccacccacacttacacctctgccctctgttttgacaacgagccagcaagaagagtttagaggattttcctttatgccagatgatttggatttatga

SEQ ID NO: 266 - protein, 1151 aa, Saccharomyces cerevisiae
MSFSQLEQNIKKKIAVEENIIRGASALKKKTSNVMVIQKCNTNIREARQNLEYLEDSLKKLRLKTAQQSQGENGSEDNERFNSKEYGFLSTKSPNEHIFSRLDLVKYDCPSLAQRIQYMLQQLEFKLQVEKQYQEANTKLTKLYQIDGDQRSSSAAEGGAMESKYRIQMLNKALKKYQAINVDFDQFKHQPNDIMDNQQPKFRRKQLTGVLTIGITAARDVDHIQSPMFARKPESYVTIKIDDTIKARTKPSRNDRWSEDFQIPVEKGNEIEITVYDKVNDSLIPVAIMWLLLSDIAEEIRKKKAGQTNEQQGWVNASNINGGSSLASEEGSTLTSTYSNSAIQSTSAKNVQGENTSTSQISTNSWFVLEPSGQILLTLGFHKSSQIERKQLMGGLHRHGAIINRKEEIFEQHGHHFVQKSFYNIMCCAYCGDFLRYTGFQCQDCKFLCHKKCYTNVVTKCIAKTSTDTDPDEAKLNHRIPHRFLPTSNRGTKWCCHCGYILPWGRHKVRKCSECGIMCHAQCAHLVPDFCGMSMEMANKILKTIQDTKRNQEKKKRTVPSAQLGSSIGTANGSDLSPSKLAERANAPLPPQPRKHDKTPSPQKVGRDSPTKQHDPIIDKKISLQTHGREKLNKFIDENEAYLNFTEGAQQTAEFSSPEKTLDPTSNRRSLGLTDLSIEHSQTWESKDDLMRDELELWKAQREEMELEIKQDSGEIQEDLEVDHIDLETKQKLDWENKNDFREADLTIDSTHTNPFRDMNSETFQIEQDHASKEVLQETVSLAPTSTHPSRTTDQQSPQKSQTSTSAKHKKRAAKRRKVSLDNFVLLKVLGKGNFGKVILSKSKNTDRLCAIKVLKKDNIIQNHDIESARAEKKVFLLATKTKHPFLTNLYCSFQTENRIYFAMEFIGGGDLMWHVQNQRLSVRRAKFYAAEVLLALKYFHDNGVIYRDLKLENILLTPEGHIKIADYGLCKDEMWYGNRTSTFCGTPEFMAPEILKEQEYTKAVDWWAFGVLLYQMLLCQSPFSGDDEDEVFNAILTDEPLYPIDMAGEIVQIFQGLLTKDPEKRLGAGPRDADEVMEEPFFRNINFDDILNLRVKPPYIPEIKSPEDTSYFEQEFTSAPPTLTPLPSVLTTSQQEEFRGFSFMPDDLDL

SEQ ID NO: 267 - DNA, 1110 bp, Saccharomyces cerevisiae
atggatacagatttagatgtgcctatgcaagatgctgttaccgaacagctgactcccacagtatctgaagatatggatctcaacaacaattcatcggataataatgcagaagaattctcggttgatgatttaaaacctggttcctcgggcatagcagatcacaaatcttccaaaccactagaactgaataacacaaatataaatcagcttgaccaatggattgagcatttgagtaaatgcgagccactatcagaagacgatgtagcacgactatgtaaaatggcggtggacgtgttgcagttcgaggagaatgttaaaccaattaacgtgcctgttaccatttgtggtgacgtacacggtcaattccatgacttgttagaactttttaagattggtggcccttgtcctgacaccaattaccttttcatgggtgattacgtggatagaggatattattctgttgaaactgtatcttacctagttgccatgaaagtcagatacccacatagaattacgatactgagaggcaatcacgagtctaggcagattacccaagtatacgggttttatgatgaatgtttgagaaagtacggcagtgcaaacgtgtggaaaatgttcacagatcttttcgattattttcctataaccgcattagtagataataaaattttctgtctgcatggaggactttcccccatgatagaaaccatagatcaggtgagagagttgaacagaatacaggaagtgcctcatgaaggtcctatgtgtgaccttctatggtcagaccctgacgatagaggcggatggggaatcagtcccagaggtgcaggcttcacttttggacaagatgtcagtgagcaattcaatcacactaatgatctatcactaatagcaagagctcaccaattggtaatggaaggctatgcttggtctcaccagcaaaatgttgtcaccattttcagtgctcctaattactgctacagatgtggtaatcaagcagctatcatggaagtggacgagaatcataatagacaattcttacagtacgacccatccgtaagaccaggtgaacctagcgtcagcagaaagacgccagattactttttatga

SEQ ID NO: 268 - protein, 369 aa, Saccharomyces cerevisiae
MDTDLDVPMQDAVTEQLTPTVSEDMDLNNNSSDNNAEEFSVDDLKPGSSGIADHKSSKPLELNNTNINQLDQWIEHLSKCEPLSEDDVARLCKMAVDVLQFEENVKPINVPVTICGDVHGQFHDLLELFKIGGPCPDTNYLFMGDYVDRGYYSVETVSYLVAMKVRYPHRITILRGNHESRQITQVYGFYDECLRKYGSANVWKMFTDLFDYFPITALVDNKIFCLHGGLSPMIETIDQVRELNRIQEVPHEGPMCDLLWSDPDDRGGWGISPRGAGFTFGQDVSEQFNHTNDLSLIARAHQLVMEGYAWSHQQNVVTIFSAPNYCYRCGNQAAIMEVDENHNRQFLQYDPSVRPGEPSVSRKTPDYFL

SEQ ID NO: 269 - DNA, 1134 bp, Saccharomyces cerevisiae
atggatatggaaattgatgaccctatgcatggttcagatgaagatcaattatcaccgactctcgacgaagacatgaatagtgatgacggcaaaaataatacgaaggcgcgttctaatgacgaagacacagatgaagagttggaagattttaattttaaaccggggtcctcgggtatagcagatcataaatcctccaaaccactaaaactgaccaatacaaatataaatcagcttgaccaatggattgagcatttgagtaaatgcgagccactatcagaagacgatgtagcacgactatgtaaaatggcggtggacgtgttgcagttcgaggagaatgttaaaccaattaacgtgcctgttaccatttgtggtgacgtacacggtcaattccatgacttgttagaacttttcaagattggtggtccttgtcctgacaccaattaccttttcatgggtgattacgtggatagaggatattattctgttgagaccgtatcttacctagttgccatgaaagtcagatatccacatagaattactatacttaggggcaatcacgagtctaggcagattacccaagtatatgggttttatgacgaatgtttgagaaagtacggcagtgcgaacgtgtggaaaatgtttaccgatctattcgattatttccccgttactgccttggtggataataaaatcttctgtttgcatggaggtctctcacccatgatagagacaatagatcaagttagagatttaaatagaatacaggaagtgcctcacgaaggtccaatgtgtgaccttctatggtccgatcctgatgatagaggcggatggggaatcagtccgagaggtgcaggcttcacttttggtcaagacatcagtgagcaattcaatcacactaatgacctatcactaatagcaagagctcaccaattggtaatggaaggatattcttggtctcaccagcaaaatgttgtcaccattttcagtgctccaaattattgttatagatgtggtaaccaggccgctattatggaggtggatgaaaaccataataggcaattcttacaatacgatccatctgtgagacccggtgaaccaaccgtcaccaggaagacaccggattatttcttataa

SEQ ID NO: 270 - protein, 377 aa, Saccharomyces cerevisiae
MDMEIDDPMHGSDEDQLSPTLDEDMNSDDGKNNTKARSNDEDTDEELEDFNFKPGSSGIADHKSSKPLKLTNTNINQLDQWIEHLSKCEPLSEDDVARLCKMAVDVLQFEENVKPINVPVTICGDVHGQFHDLLELFKIGGPCPDTNYLFMGDYVDRGYYSVETVSYLVAMKVRYPHRITILRGNHESRQITQVYGFYDECLRKYGSANVWKMFTDLFDYFPVTALVDNKIFCLHGGLSPMIETIDQVRDLNRIQEVPHEGPMCDLLWSDPDDRGGWGISPRGAGFTFGQDISEQFNHTNDLSLIARAHQLVMEGYSWSHQQNVVTIFSAPNYCYRCGNQAAIMEVDENHNRQFLQYDPSVRPGEPTVTRKTPDYFL

SEQ ID NO: 271 - DNA, 2715 bp, Saccharomyces cerevisiae
atgaagcagaaaaaatttaactccaaaaaaagtaatagaacagatttatcaaaaagaggagattctcctaatataggaatttccaaatctagaactgcatgtaaacgatgtcgattgaaaaaaattaaatgtgatcaggagtttcctagctgtaagaggtgtgcaaaattagaggtaccatgtgtttctttggacccagccaccggaaaggacgttccaagatcttacgtcttttttctggaagatagattggctgtcatgatgcgtgtgttgaaagaatatggagtagatcccacgaaaatacgaggaaatatacctgctacaagtgatgatgaaccttttgatttgaaaaagtacagttcagtttcatctttgggagaagagggaatattgccacataatggcttattggcggattatttggttcagaaagggaattctatggcatcctcagctataacgagcaagtctatggcaagcccacagactataaatgtacaacgcaaggaatttctggtaaactcaaaaaaacaagatggtagcgctttattacccgagacaggcagccctatgacttcagatgcaagagcggaagagctacgccgatgtaataaggagatcagtgcgctgggcacgatgagagaaagtagttttaactcttttttaggagattcatcgggtatttcctttgcgaaattagtcttcacggcaactaattttcgtcaagattccggagatgacgttctggatgaagatattaaacaaagggaacagaaatacaatggatatgcagaggctgaaaacaatccacactttgatccattggaactaccacctcgacatgccgctgaagttatgatatccaggttttttgtagatactaattcccagttacctttgctgcatagagaacttttcctgaaaaaatactttgaacctatttatggtccctggaatcccaatattgcattggcatctgatcagacaggcataaatagcgcgttcgaaattccaattaccagtgcttttagtgcgcatactgaaccaaaaagggagaacgttactgagaagattgacgtatgctcttccgtggatgttccatggtatgacacttgggagacatctcaaaaagtcaacatgcgtccgatagttgaactaccgacaaaatttcacataccttatttttttttaaacattatatttgctattggccatgctacgcaggtacttaagtcagatattactactgtcgcgacatataagagacgcgctactaaatatattgcatctttattttcatcttcagacaggttggaggcattggcaggcactttgctcatggtaatctattcaataatgagacctaatgtccccggtgtttggtatactatgggttctgtactaagactaacggttgacctaggactacattcggaaaaaattaataaaaattatgacgcctttaccagagaaatacgcaggcgtctattttggtgcgtttactccttagatcggcaaatttgctcgtattttggtcgaccttttggtatacctgaagaaagcatcaccaccaggtatcctagccttttggacgattccttcatcacattaactaaccgagaaattgacgactactcagacttaccaagcccaaatccgtcttcaaaagttatcgcattggccatgtataaaatcagaagaatccaagctagtatagtgagaatactctacgcgcccggtgcagaattgccgaggaggtttatggatctcgagagctggcggattgaaacctacaatgagcttgagcgttggttccaagtggacgttcccaaaaactttgagatgatgaattgcaaatttaacagcatctggtttgatctgaactatcattactcgaagagcattctttatggactttctccaaaattccctactttgaatgataccgcttttaaaattgtcctggacagtacgaagggcaccatagacgtattttacaatctttgtgtcaataaaaaaattggttacacgtgggtagcagttcataacatgttcatgacaggtatgacttacctttacgtaaatttttactcaaaaaacaacataaatgattgtcaagaaaaagtgtcagagtacactgaaaaagtgttgatagtactgaagaatctgataggtttttgcgaatctgcgaaaacctgttacacgagttacaaaattttatcatcagttgtaataaagttaaaatttatgcaaataaatgatgccaaagggatattttcggattcaaatcccctaacctctcaggcaaaccgcatgtcaagttatgataaaaaaacgaacgtacttggttttgacgacggtacttttgataacaaggtttttaatagaaccaattttgaagaaaaagcaccttttgatatacctctagatgaattttttaccgaactggaaaaacacagcaatgtttcccagtttaatactttagatgtaagcgaaggtaatcaagtgataaatgaaagtgcttctacaaatacgtcttctgcattgaattgccagtcgtataccaataatcaagatatcatggatatccttttccaggttacttcgggatctgtatgggatgagttttttgtcaggtctggtaacggaaacgaaggcgagtcttcttacgatatcagtaaaggaaagaactctgaatccggtggaatattttag

SEQ ID NO: 272 - protein, 904 aa, Saccharomyces cerevisiae
MKQKKFNSKKSNRTDLSKRGDSPNIGISKSRTACKRCRLKKIKCDQEFPSCKRCAKLEVPCVSLDPATGKDVPRSYVFFLEDRLAVMMRVLKEYGVDPTKIRGNIPATSDDEPFDLKKYSSVSSLGEEGILPHNGLLADYLVQKGNSMASSAITSKSMASPQTINVQRKEFLVNSKKQDGSALLPETGSPMTSDARAEELRRCNKEISALGTMRESSFNSFLGDSSGISFAKLVFTATNFRQDSGDDVLDEDIKQREQKYNGYAEAENNPHFDPLELPPRHAAEVMISRFFVDTNSQLPLLHRELFLKKYFEPIYGPWNPNIALASDQTGINSAFEIPITSAFSAHTEPKRENVTEKIDVCSSVDVPWYDTWETSQKVNMRPIVELPTKFHIPYFFLNIIFAIGHATQVLKSDITTVATYKRRATKYIASLFSSSDRLEALAGTLLMVIYSIMRPNVPGVWYTMGSVLRLTVDLGLHSEKINKNYDAFTREIRRRLFWCVYSLDRQICSYFGRPFGIPEESITTRYPSLLDDSFITLTNREIDDYSDLPSPNPSSKVIALAMYKIRRIQASIVRILYAPGAELPRRFMDLESWRIETYNELERWFQVDVPKNFEMMNCKFNSIWFDLNYHYSKSILYGLSPKFPTLNDTAFKIVLDSTKGTIDVFYNLCVNKKIGYTWVAVHNMFMTGMTYLYVNFYSKNNINDCQEKVSEYTEKVLIVLKNLIGFCESAKTCYTSYKILSSVVIKLKFMQINDAKGIFSDSNPLTSQANRMSSYDKKTNVLGFDDGTFDNKVFNRTNFEEKAPFDIPLDEFFTELEKHSNVSQFNTLDVSEGNQVINESASTNTSSALNCQSYTNNQDIMDILFQVTSGSVWDEFFVRSGNGNEGESSYDISKGKNSESGGIF

SEQ ID NO: 273 - DNA, 2079 bp, Saccharomyces cerevisiae
atgggtaattcaagttcaaaatcttcgaaaaaggattcacattcgaattcctcctcgagaaatcctcgtcctcaagtgtcgagaaccgagacttcccattctgtgaagtctgcaaaatcaaataaatcttcaagatcaaggcgatctcttccttcttcgtccactacgaatactaattcaaacgtccctgatccctccactccatcaaagcccaatcttgaggttaatcaccaacgacatagctctcacacgaatcgttaccatttcccatctagctcacactcgcattcaaattctcaaaacgaattgttaactactccttcatcatcctctactaagaggccttctacttctagaagatcaagttataatactaaggctgctgctgatttaccaccttcaatgatccaaatggaacccaagtcacccattttaaaaacaaacaatagtagcacacacgtatccaagcataaatcttcatactcatctacctattatgagaacgccttaaccgatgatgacaatgatgataaagacaacgacatctcgcacactaaaaggttttctagatcttcgaattctcgtccgtccagtataagaagcggatcagtgtcaagaaggaaatcagatgtgacccatgaagagcctaacaatggatcatactcctctaacaatcaggagaattatctcgttcaggcattaacccggtcaaattctcatgcatcttcgctacacagtaggaaatcttcgtttggatcagatggtaataccgcatacagcaccccattaaactctccaggcttgtccaagctaacagatcactctggtgaatactttacctctaattcaacctcctcattgaatcaccattcaagtcgcgatatttacccgagcaaacacatcagcaatgatgatgacattgaaaattcatctcaattgagtaatatccatgcatcaatggaaaatgttaatgataaaaataataatataacagatagcaaaaaagatccgaatgaggaatttaatgatataatgcaatcttccggaaacaaaaacgctccaaaaaaattcaaaaagcctatcgatattgatgaaactatccaaaaattactggatgcgggctacgctgctaagagaacaaaaaatgtttgtttgaagaacaatgaaattttacagatttgcatcaaggctcgtgaaatctttctttctcaaccttccttattagaattatcacctcctgtaaaaattgtaggcgacgttcatggccaatatggggatctcttaaggctttttaccaaatgtgggttcccaccatcctcgaactatttattcctaggtgattatgtggaccgtggtaaacagtcactggagactattttactattgttttgttacaaaataaaataccctgaaaatttctttttattgagaggcaaccatgaatgtgctaacgtcacaagggtttatggattttatgatgaatgtaaacgtcgttgtaacatcaagatctggaagacattcatcgatacttttaatacattaccattagctgctatcgtagccggaaagattttttgtgttcatggtggattgtcgccagttttaaattctatggatgaaatcagacatgtagttaggcctactgatgtaccagattttggcttaattaatgatcttttgtggtccgatcccacagattcacccaacgaatgggaggataacgaacgtggtgtaagttactgttataataaggtggcaattaacaaattcttgaacaagtttgggtttgatttggtttgtagagctcacatggttgtggaagacggttatgaatttttcaatgatagaagtctcgttacggtgttttccgcgccaaattattgtggtgaatttgataattggggggctgtaatgagcgtcagcgaaggtttattgtgctcttttgaattgttagatccactagatagtgcagctttgaagcaagttatgaagaaaggtagacaggaaagaaaactggctaatcaacaacagcaaatgatggaaacaagcatcacaaatgataacgaatctcaacagtaa

SEQ ID NO: 274 - protein, 692 aa, Saccharomyces cerevisiae
MGNSSSKSSKKDSHSNSSSRNPRPQVSRTETSHSVKSAKSNKSSRSRRSLPSSSTTNTNSNVPDPSTPSKPNLEVNHQRHSSHTNRYHFPSSSHSHSNSQNELLTTPSSSSTKRPSTSRRSSYNTKAAADLPPSMIQMEPKSPILKTNNSSTHVSKHKSSYSSTYYENALTDDDNDDKDNDISHTKRFSRSSNSRPSSIRSGSVSRRKSDVTHEEPNNGSYSSNNQENYLVQALTRSNSHASSLHSRKSSFGSDGNTAYSTPLNSPGLSKLTDHSGEYFTSNSTSSLNHHSSRDIYPSKHISNDDDIENSSQLSNIHASMENVNDKNNNITDSKKDPNEEFNDIMQSSGNKNAPKKFKKPIDIDETIQKLLDAGYAAKRTKNVCLKNNEILQICIKAREIFLSQPSLLELSPPVKIVGDVHGQYGDLLRLFTKCGFPPSSNYLFLGDYVDRGKQSLETILLLFCYKIKYPENFFLLRGNHECANVTRVYGFYDECKRRCNIKIWKTFIDTFNTLPLAAIVAGKIFCVHGGLSPVLNSMDEIRHVVRPTDVPDFGLINDLLWSDPTDSPNEWEDNERGVSYCYNKVAINKFLNKFGFDLVCRAHMVVEDGYEFFNDRSLVTVFSAPNYCGEFDNWGAVMSVSEGLLCSFELLDPLDSAALKQVMKKGRQERKLANQQQQMMETSITNDNESQQ

SEQ ID NO: 275 - DNA, 2133 bp, Saccharomyces cerevisiae
atgggtaattccggttcgaaacaacataccaagcacaatagcaagaaggatgaccacgacggtgacaggaaaaagacactagatctcccaccactgacaaaatcggatactacacattcgctgaaatcgtcaaggtcgctgaggtcgctgcggtcgaaacgctcagaggcgtcgttggcatctaatgttcaagctcaaacgcaacccctctcccgcagatcgtccactctgggaaacggcaatcgcaaccataggcgatcaaacaacgccccaatcactcctcctaataaccactacctaacctcacatcccagttcgtcaagaagactctcttcctcttcgagaaggtcgagcatggggaataataacaattcagaattgcccccgtcaatgatccagatggagcccaaatcacccatcttgaaaaatagtacaagcatgcattccactagctctttcaactcttacgaaaatgcgttgactgatgatgacgacgataggggggatgatggcggcgagagcccctcaatggccaaagttactcgcatcaacactagttcttccgcagatagaggctccaagcgtactcctttaagacgtcataattcattacaaccggaaaaaggtgtaacaggattttcctcgacttcatcgaaattacgcagaagatcagacaatactctgccagcaagttatcctttaaatgcagaagcaggagggaatggcagcgactatttctcaaacagatcaaactcgcatgcatcatccaggaagtcgtcatttggctccactgggaatacagcttatagcacaccactgcattcacctgcgttaagaaaaatgagctcgagggacaacgacgatagcggagacaacgtcaacggtagaggcacctcacctatccctaatctaaacatagacaagccttcgccgtcagcgtcgtcagcgtcaaaaagagaatatttaagtgcatatccaacactagctcacagagattcatcatcttcacttagtccgcggggcaaaggacaacggtcttcatcgtcttccagttccagtcaaagaatatatgtttccccaccatctcccacaggtgatttcgtacacgggagttgtgcagacggtgataatggatctaggactaatactatggtcgaaatgaaaaggaaaaaaccagttcgtccagtggacatagatgaaattatccagagattactagatgccggctatgccgcaaagaggaccaagaatgtttgcttaaagaattccgagattattcaaatttgccataaggctcgtgaattattccttgcccaacctgctctcttagaattatctccctcggtaaaaatagtgggtgatgttcacggccaatatgcagatcttttgagactttttaccaaatgcggtttcccccccatggcaaattacttatttttaggcgattacgtagatcgcggtaagcagtccctggagaccattttactattactatgctataagattaaatatcctgaaaatttcttcctcttaagaggcaatcatgaatgtgccaatgttacaagagtctacgggttttatgatgaatgtaaacgacgttgtaatatcaagatttggaaaacctttgttgacacgttcaacacgctaccgttagcagccatcgtcacaggaaaaatattttgtgttcatggtggactatcacctgttctaaattccatggacgaaattaggcacgttagtaggcccaccgatgtacccgacttcggcttaattaatgaccttttatggtcggatcctacagattcatcgaatgaatgggaggataatgagcgtggagttagtttttgttacaataaagtggctattaataaatttttaaacaaattcggattcgatttagtgtgtagagcacatatggtggtggaagatggttatgaattctttaatgacagaagcttagttacagtgttttcggctcccaactattgtggtgaattcgataactggggtgctgtcatgaccgttagtgaaggcctactctgttcttttgagttgttggacccactggacagtaccgctttgaaacaagtgatgaaaaaaggcaggcaagaacgtaaattagccaatcgctga

SEQ ID NO: 276 - protein, 710 aa, Saccharomyces cerevisiae
MGNSGSKQHTKHNSKKDDHDGDRKKTLDLPPLTKSDTTHSLKSSRSLRSLRSKRSEASLASNVQAQTQPLSRRSSTLGNGNRNHRRSNNAPITPPNNHYLTSHPSSSRRLSSSSRRSSMGNNNNSELPPSMIQMEPKSPILKNSTSMHSTSSFNSYENALTDDDDDRGDDGGESPSMAKVTRINTSSSADRGSKRTPLRRHNSLQPEKGVTGFSSTSSKLRRRSDNTLPASYPLNAEAGGNGSDYFSNRSNSHASSRKSSFGSTGNTAYSTPLHSPALRKMSSRDNDDSGDNVNGRGTSPIPNLNIDKPSPSASSASKREYLSAYPTLAHRDSSSSLSPRGKGQRSSSSSSSSQRIYVSPPSPTGDFVHGSCADGDNGSRTNTMVEMKRKKPVRPVDIDEIIQRLLDAGYAAKRTKNVCLKNSEIIQICHKARELFLAQPALLELSPSVKIVGDVHGQYADLLRLFTKCGFPPMANYLFLGDYVDRGKQSLETILLLLCYKIKYPENFFLLRGNHECANVTRVYGFYDECKRRCNIKIWKTFVDTFNTLPLAAIVTGKIFCVHGGLSPVLNSMDEIRHVSRPTDVPDFGLINDLLWSDPTDSSNEWEDNERGVSFCYNKVAINKFLNKFGFDLVCRAHMVVEDGYEFFNDRSLVTVFSAPNYCGEFDNWGAVMTVSEGLLCSFELLDPLDSTALKQVMKKGRQERKLANR

SEQ ID NO: 277 - DNA, 846 bp, Saccharomyces cerevisiae
atgagtaatcattctgaaatcttagaaaggccagaaacaccatatgacataacttatagagtaggtgtggcggaaaataaaaactcgaaatttcggaggacaatggaagatgttcatacgtatgttaaaaactttgcttcaagattagattggggatatttcgcggtgtttgatggacatgctgggattcaggcctccaaatggtgtggtaaacatcttcatacaattatagagcaaaacattttggcagatgaaacacgagatgttagagatgtattgaacgattcattcctagccattgacgaagaaattaatacaaaacttgtaggaaatagtggatgtactgctgctgtttgcgtattacgttgggagcttccggattcagtttctgatgattcaatggatttagcccaacaccaaagaaagttatatacagcaaatgttggtgattctcgaatagtattgtttagaaacgggaacagcataagactgacttatgatcataaggcatctgacactttggagatgcagagagttgaacaagcaggtggcctgataatgaaaagtcgtgtaaatggtatgctggcagtgacgagatcgttaggggataaattttttgatagtttagtagtgggcagcccatttaccacgagcgtagaaataacttctgaggacaaatttttaatcctagcgtgtgatggattatgggatgttattgatgatcaagatgcatgcgaattaatcaaggatattactgaacctaatgaagctgcaaaagtcttggttagatatgctttggaaaatggcacaacagataatgtaacggtcatggttgtcttcctctaa

SEQ ID NO: 278 - protein, 281 aa, Saccharomyces cerevisiae
MSNHSEILERPETPYDITYRVGVAENKNSKFRRTMEDVHTYVKNFASRLDWGYFAVFDGHAGIQASKWCGKHLHTIIEQNILADETRDVRDVLNDSFLAIDEEINTKLVGNSGCTAAVCVLRWELPDSVSDDSMDLAQHQRKLYTANVGDSRIVLFRNGNSIRLTYDHKASDTLEMQRVEQAGGLIMKSRVNGMLAVTRSLGDKFFDSLVVGSPFTTSVEITSEDKFLILACDGLWDVIDDQDACELIKDITEPNEAAKVLVRYALENGTTDNVTVMVVFL

SEQ ID NO: 279 - DNA, 2253 bp, Saccharomyces cerevisiae
atggatcgcatagcacagcaatatcgtaatggcaaaagagacaataacggcaatagaatggcttcttccgctatatcggaaaagggccacatacaagtcaatcaaactagaacacctggtcaaatgcccgtctatagaggtgaaactataaatctgtctaaccttccccaaaatcaaattaaaccgtgcaaagatttggacgacgttaacatacggcggaacaactctaataggcattctaaaatacttttactagatctgtgcgctggccccaataccaactcatttttaggcaataccaatgctaaggatatcacagttttatcgttgccgctacccagcactttggtgaaaaggtcgaactacccgttcgagaacttactaaagaattaccttggatctgatgaaaagtatattgagttcacaaagatcatcaaagattatgatattttcattttcagtgattcgtttagcagaatttcgagttgtttaaagacaactttttgcctcattgagaagtttaaaaagttcatctgccatttttttccatctccttatttgaaattctttcttctcgaaggctctctgaatgatagcaaggccccctcattaggaaaaaataagaaaaattgcatcttgcccaaattggatttgaacttgaatgtaaacttaacttcaaggtcaactttaaatttaagaataaacatacctccacccaatgattcaaataaaatatttttacagtctctgaaaaaggatctaattcattattctcctaattctttgcaaaagtttttccaattcaatatgcctgctgacttagcacctaacgacacgattttaccgaattggctaaaattctgctccgtaaaagaaaatgaaaaggtaatattaaagaaactctttaacaattttgaaactttagaaaattttgaaatgcaaagattagagaaatgcctgaaattcaagaaaaagcctttacatcaaaagcagctatcacaaaagcagaggggtccgcaatccacggatgattcaaaattatattctttaactagtttgcaacgacagtataaaagttctttgaaaagcaacatacagaaaaatcaaaagctaaaattaattataccaaaaaacaacacatcttcttcgccatcaccattatcttccgatgatactataatgtcaccaataaatgattacgaacttactgaaggaattcagtcttttactaagaatagatattctaatatcttaccttacgaacattcaagagtaaagttacctcactccccgaaaccacctgcagtttctgaagcatccacaaccgaaactaaaacagataagtcatatccgatgtgtcccgtagatgcaaaaaaccactcctgcaaaccgaacgactatatcaatgcgaactatttgaagctcacgcaaattaatcctgatttcaagtatattgctacccaagctccgcttccttctacgatggatgatttttggaaggttattactttaaataaagttaaagtaataatatcattgaattctgacgatgaattgaatttaagaaaatgggatatttactggaataatctgtcatattccaaccacactatcaaacttcagaacacctgggagaatatttgcaatattaatggctgtgttctcagagtctttcaagtcaagaaaacagctccacaaaatgataatatcagtcaagattgtgaccttccgcataatggtgaccttacttccattaccatggctgtatccgagccgtttattgtttaccaattacaatacaagaattggttagattcatgcggcgtagatatgaatgacatcattaaactacacaaagtcaaaaattcgttattgtttaacccgcaaagttttattacaagcctcgaaaaggatgtttgcaagcctgatttgatagatgataataatagtgagttacatctcgatacagcaaattcatcgccactattagtccattgttctgcagggtgtggaagaacaggtgttttcgttaccttggatttcctactaagtattctttcacctacaacaaatcactcaaacaagattgatgtttggaatatgactcaggaccttatctttatcatagtgaatgaattaagaaagcaaaggatttcaatggtacagaatctaactcaatatatcgcttgttatgaggcattattaaattattttgccctgcaaaagcagataaagaacgcgttaccttgttaa

SEQ ID NO: 280 - protein, 750 aa, Saccharomyces cerevisiae
MDRIAQQYRNGKRDNNGNRMASSAISEKGHIQVNQTRTPGQMPVYRGETINLSNLPQNQIKPCKDLDDVNIRRNNSNRHSKILLLDLCAGPNTNSFLGNTNAKDITVLSLPLPSTLVKRSNYPFENLLKNYLGSDEKYIEFTKIIKDYDIFIFSDSFSRISSCLKTTFCLIEKFKKFICHFFPSPYLKFFLLEGSLNDSKAPSLGKNKKNCILPKLDLNLNVNLTSRSTLNLRINIPPPNDSNKIFLQSLKKDLIHYSPNSLQKFFQFNMPADLAPNDTILPNWLKFCSVKENEKVILKKLFNNFETLENFEMQRLEKCLKFKKKPLHQKQLSQKQRGPQSTDDSKLYSLTSLQRQYKSSLKSNIQKNQKLKLIIPKNNTSSSPSPLSSDDTIMSPINDYELTEGIQSFTKNRYSNILPYEHSRVKLPHSPKPPAVSEASTTETKTDKSYPMCPVDAKNHSCKPNDYINANYLKLTQINPDFKYIATQAPLPSTMDDFWKVITLNKVKVIISLNSDDELNLRKWDIYWNNLSYSNHTIKLQNTWENICNINGCVLRVFQVKKTAPQNDNISQDCDLPHNGDLTSITMAVSEPFIVYQLQYKNWLDSCGVDMNDIIKLHKVKNSLLFNPQSFITSLEKDVCKPDLIDDNNSELHLDTANSSPLLVHCSAGCGRTGVFVTLDFLLSILSPTTNHSNKIDVWNMTQDLIFIIVNELRKQRISMVQNLTQYIACYEALLNYFALQKQIKNALPC

SEQ ID NO: 281 - DNA, 2787 bp, Saccharomyces cerevisiae
atgaaggacagtgtagactgcccaagcattctacccaccgaccgcacttcagtgctttccgagactagcactttggtcggatcgagttcgcatgtatattcgaggcatgctcctatgaacagttatcataacagcatgaacagcaacatataccacagccccaaagccagtagccctttggtgagctataagacatcttcgccggtgttattgaagagggcgaccgctcctgtcctgccaagcttcaagcccaaggaacagcgatataataagccgcagggttgttcgctaattactgctgtagaactgggcaagattattgaaaccttaccagatgaaaaggtgctcttacttgatgttaggccgtttaccgaacatgccaaatccattatcacaaactccattcatgtatgtttgccttccacgctgctgaggaggaaaaatttcaccttttccaaactcttggacaacttaactcctagcgagcaaagcgtgttgaaatctaaactggccatcgataaccttcggattatcatttatgatagcaccgcaaatcaaacggaaagttctgtttctttaccttgttatggaatagcgtccaagctaatagagtttgatactaatgttaaaaaaaccgtgtctatactaatgtgtggttttcctcaattcaaaattctatttccagaccatataaacaccaacacatttaactcagattgcattagttcggctgaacctaaaagccccaagacaaaccttatgaacagtctacacaacacagcgccgcatatgacggcgacaacaccactatcgtctccgcaaatgaaccttaagttgaaagttcctgacgatagtaggtcagatcattcaaacttttccagttctccctctccgcgtaacgtcctatcagattctcccatgtcttcttcttcccccatatctgccttatttaagttccagctgcctgcaccacaaacaaacataaaccaaatgttcaaattttcgcaaaatgaagaaataatgggtttagagacgtatttgagtgcagtcaacatcaaagaagaacatgaaagatggtataataacgattctgccaaaaaatctttacaaaacttccaattcccaaagaaccaaaattctctagaaaaggacactaataaagacaaactagggtttcagatcagatacgaaaacctgagcaaaaattacgaaaaggaggtcattgactccgttatacctgaatggttccagcatctgatgtcaatacccaagatcgagttggtttctcagtttcaaaaattagattttttggaaaaaaggcgcttgaaccattctgtctctttcaggaagaaggaaaactcgtttatacttgaaaagccatcatcatatcctgaacagttaacatcaacttcttcttcaacaatcatgcctccaaaatttcctgacgtgaacaaagtacaaaagaggtcgcattctcagccaatcttcactcaatacagtaaatataaatcgatgctcagccttgaatcagattccgattcggagtcagatgacgttataatatcatcaggcgttgaattaggagccaagaacaggtacaaggatatttttccctacgagcattcgagagtgattctaaaaaaaggtttgcaatcatcaaaaggtatcaagcattcacattctacttccgatggtggcatcctcgacaattatatcaacgcaaactatttgtctctgccaaggttttctgtagagcaaaattcgtcatttcaaacaactacaaccacaacaagaagagtgcgctatatagcgacgcaagctccaatgccctccactgtacatgacttttatacatgcatattgaataatggcgttccgttggttctctcattgacaaatgatttcgaaaatggcattgagaaatgttatcgatattggcaagaaggtaattataacggtattcacgttaaattgttagaaaaaaaaatattaaagatgcctagcactactagcatgaggaaaaatactatgggaacacaaaatagtagtttatattcagctggtgttcagggaaatagtagtaactatagtactgataatgataatgataatgacaacaataataataacaataacaatagtaatattcctgttactgctgctgcttgtgatgatgatgatgatgatgatgatgacgcaattctcataagacaaattctgctaacatatcatgatcaagagaaaccttatgaattgttacagattcaggtgaaaaattggcctgatttgggcactttactcaatcctatctcaatcttacaagcaatcaatgtcaagaatcacataatagatacactatttgccagaaattactatcaaaacgaccaacttcctaccattttggttcattgttccgcaggttgtggaaggactggtactttgtgtaccattgattccattctatccaatttcgaaatgtttgaaatgttgcagaaagagtttgttaaattaaaatacccggcaaagttattcgatccaatttcatggacaattaatatttttagaaaggaacgaatatccatggtccagaacattaatcaatttattttcatttatgactgcttgctattttactttagattacgtcttgatgacataacagagagaacggatggtgatggaagtaacaaggacaatatatcattaagtgcattaattgaacaaatcgaaaaattagagatcttgcagacattcgtggatgataagttgaaagaattgccacaatag

SEQ ID NO: 282 - protein, 928 aa, Saccharomyces cerevisiae
MKDSVDCPSILPTDRTSVLSETSTLVGSSSHVYSRHAPMNSYHNSMNSNIYHSPKASSPLVSYKTSSPVLLKRATAPVLPSFKPKEQRYNKPQGCSLITAVELGKIIETLPDEKVLLLDVRPFTEHAKSIITNSIHVCLPSTLLRRKNFTFSKLLDNLTPSEQSVLKSKLAIDNLRIIIYDSTANQTESSVSLPCYGIASKLIEFDTNVKKTVSILMCGFPQFKILFPDHINTNTFNSDCISSAEPKSPKTNLMNSLHNTAPHMTATTPLSSPQMNLKLKVPDDSRSDHSNFSSSPSPRNVLSDSPMSSSSPISALFKFQLPAPQTNINQMFKFSQNEEIMGLETYLSAVNIKEEHERWYNNDSAKKSLQNFQFPKNQNSLEKDTNKDKLGFQIRYENLSKNYEKEVIDSVIPEWFQHLMSIPKIELVSQFQKLDFLEKRRLNHSVSFRKKENSFILEKPSSYPEQLTSTSSSTIMPPKFPDVNKVQKRSHSQPIFTQYSKYKSMLSLESDSDSESDDVIISSGVELGAKNRYKDIFPYEHSRVILKKGLQSSKGIKHSHSTSDGGILDNYINANYLSLPRFSVEQNSSFQTTTTTTRRVRYIATQAPMPSTVHDFYTCILNNGVPLVLSLTNDFENGIEKCYRYWQEGNYNGIHVKLLEKKILKMPSTTSMRKNTMGTQNSSLYSAGVQGNSSNYSTDNDNDNDNNNNNNNNSNIPVTAAACDDDDDDDDDAILIRQILLTYHDQEKPYELLQIQVKNWPDLGTLLNPISILQAINVKNHIIDTLFARNYYQNDQLPTILVHCSAGCGRTGTLCTIDSILSNFEMFEMLQKEFVKLKYPAKLFDPISWTINIFRKERISMVQNINQFIFIYDCLLFYFRLRLDDITERTDGDGSNKDNISLSALIEQIEKLEILQTFVDDKLKELPQ

SEQ ID NO: 283 - DNA, 2940 bp, Saccharomyces cerevisiae
atggtgaccgaccaaggcagtaggcattcgatacaatctaagcaaccagcctacgttaataaacaaccgcaaaaaaggcagcagagatcttctgtcgcatgcctttcttgtaggaaacgtcatataaaatgtcctggtggtaacccttgccaaaaatgtgttacgagcaatgccatatgtgagtacttggagccgtcaaaaaaaattgttgtgtcgacaaagtatctgcaacaactgcaaaaagacttgaatgataaaactgaagagaataaccgcctgaaagctttgctcttggagagaccagtgagtgtacgtggtaaggataacagcgatgatgacgagaggcatataaacaatgcaccctcaagtgacacattggaagtatccagcgctccggcggctcctatatttgacctcatgtccaatagtaacactgcgtccgataacgataacgacgatgacaacagcaacagaatcacaaataataggagctatgatcatagtttggaaaaatactacaaaaaggccatcagcatctttaaacaaccagctaatgctaatggcgaaaatggcaacggtgccaatggtcatgaggatgatgatgaagatgatgaagaaatatcaacaaattttgctcaaagaagtggtaggctcatagaatctcacaatggattccattattttgttggatcttcttcaatgacattatttgggttagaaattcaatctttggttacaaagtatatttcggtcaagaattttcgacctttgccaataaacaccaaaaacaagattttaaattcaaacctgaacccggctataagttcttttatcaattcaaacaactatcttttctcgtcctataattttttgaaccctatatcgactattgtcaacttaaactcaatcaacgataatttatctccattgatgtttaagataattttgaaaagcgatacggatggtagtagtggccaggaagaggtaatacagtttcagttgccttcgtataattacacaaaactattaattgactgctttataaattataacgatggttgtttttactttttcaacgaaggcctggttaaatgtggcattaacaaattgtacttggaaaataaatggctatactatgataataccaaaaaagctttggacaatgagaatgatccaattttacaagctgtttggttttgcaaaattttgttaattttagcagtaggtgaaatgtatctgggttccatcaataatgaaatgttgaagaattattctaatcagccaaaattgcccggttcaaaattttttcaaatgggttctaaaatttttaattgtttgttctcaagtgaaagattagaaaatgtgactaagaaaggcggtattgaagtcctgttgttatacgcgttcttcttacaggtggctgattacactttagcctcttatttttacttcggtcaagccctaaggacgtgcttaattctaggcttacatgttgattctcaaagcgacactctatccaggtatgaaatcgagcatcataggagactttggtggacagtttacatgtttgaacgaatgcttagctcaaaagctgggttaccattaagtttcactgattatacaatctctacagcactgccagcggatattgatgatgaaactatcgaagagaaaaatagtcactatgttttcagaaaggcagaattgatttctaactgcgttactattgtgaaaatcaatgcacaaattttgagcaaattatatcaaaggcaacctgagacaaacatcataattactttgaaagttgtcatcaagcagttgttggaatggaggaacaatttgtccgattccttacaggtggattttacgcaaaaggatgaagatttcaaaatatcgagattgtcaaccaatatgtttacggaatattttcaaggaataaacttggccgtgagacctttattatttcattttgcatccattcaattgaaaaggttcaaaacgagcaatactttcgtcaacttacaaaactattctgccacaatatcttccttattaacatgttctttgcatgcttctgtgaatactattaggtctctgtggagtttattacagaatagtatgcttgctatgtttagttatatggacagagagtatctttttacttcttcttgtactttattactattcaacactgcttttggtattcatgaacaaacactatatcatttggatcattctctggaaattttcacacaaatgagaaacttaggcaacattccagcaggcttaagaagagcacaattattaacattaatggcaaatttggatttccacggcataatgaatgacttgattactaaatataacgatattttgaaatttgattctatgaattgtgaaaacgataacatagtagaagatagcaatgaacccaaaagagaaaccgaaaagtgtaaacctcacaaagatggcgatcgcattgacccttcaattatagactgtgataaatcaaacaccaatacaaatatgatcaagaacgaatctatatcgaacattgttagcatacttccggaaggcgcgaaaccaacgctgactgattatagtaatggtaataatgatgttaatgatattaacgtcaataactcggaaccttctactttttttgatatcataactgcgagcttggaaaattcataccaaaccacgctaactgaaaagggctctcaggtgatggaaaaaaacatggatcagttggattccgttcataatctaaatgatgacgatttacaacaattgttggaggatttaggcaatattgatcattccgatgaaaaactttggaaggaaatcactgatcaagcaatgtggctgggaaatactatggatccaactgcagctgctggtagtgaaattgactttactgattatttaggaccataa

SEQ ID NO: 284 - protein, 979 aa, Saccharomyces cerevisiae
MVTDQGSRHSIQSKQPAYVNKQPQKRQQRSSVACLSCRKRHIKCPGGNPCQKCVTSNAICEYLEPSKKIVVSTKYLQQLQKDLNDKTEENNRLKALLLERPVSVRGKDNSDDDERHINNAPSSDTLEVSSAPAAPIFDLMSNSNTASDNDNDDDNSNRITNNRSYDHSLEKYYKKAISIFKQPANANGENGNGANGHEDDDEDDEEISTNFAQRSGRLIESHNGFHYFVGSSSMTLFGLEIQSLVTKYISVKNFRPLPINTKNKILNSNLNPAISSFINSNNYLFSSYNFLNPISTIVNLNSINDNLSPLMFKIILKSDTDGSSGQEEVIQFQLPSYNYTKLLIDCFINYNDGCFYFFNEGLVKCGINKLYLENKWLYYDNTKKALDNENDPILQAVWFCKILLILAVGEMYLGSINNEMLKNYSNQPKLPGSKFFQMGSKIFNCLFSSERLENVTKKGGIEVLLLYAFFLQVADYTLASYFYFGQALRTCLILGLHVDSQSDTLSRYEIEHHRRLWWTVYMFERMLSSKAGLPLSFTDYTISTALPADIDDETIEEKNSHYVFRKAELISNCVTIVKINAQILSKLYQRQPETNIIITLKVVIKQLLEWRNNLSDSLQVDFTQKDEDFKISRLSTNMFTEYFQGINLAVRPLLFHFASIQLKRFKTSNTFVNLQNYSATISSLLTCSLHASVNTIRSLWSLLQNSMLAMFSYMDREYLFTSSCTLLLFNTAFGIHEQTLYHLDHSLEIFTQMRNLGNIPAGLRRAQLLTLMANLDFHGIMNDLITKYNDILKFDSMNCENDNIVEDSNEPKRETEKCKPHKDGDRIDPSIIDCDKSNTNTNMIKNESISNIVSILPEGAKPTLTDYSNGNNDVNDINVNNSEPSTFFDIITASLENSYQTTLTEKGSQVMEKNMDQLDSVHNLNDDDLQQLLEDLGNIDHSDEKLWKEITDQAMWLGNTMDPTAAAGSEIDFTDYLGP

SEQ ID NO: 285 - DNA, 930 bp, Saccharomyces cerevisiae
atgcagggaaataaatcaactataagagagtataagatagtagttgtcggtggaggtggcgttggtaaatctgctttaacaattcaattcattcaatcatactttgtggacgaatatgaccctactatcgaagattcttacagaaaacaagttgtcatcgatgacaaagtatccattttggacattctagatactgctggacaagaagagtattctgcgatgagagaacagtacatgaggactggggaaggtttcctactggtctattccgtcacctctagaaattcctttgatgagttactgtcttattatcagcaaattcaaagagtaaaagattctgactacattcctgtagtcgtggtaggtaacaaattggaccttgaaaatgaaagacaagtctcttatgaagacgggttacgcctggccaagcagttgaatgcaccctttctagaaacgtctgcgaaacaagccatcaacgtagacgaggccttttatagccttattcgtttggtaagggacgacggtgggaaatacaatagcatgaatcgtcaactggataatacgaatgaaataagagattcggagctaacctcatctgcaacagcggatagagaaaaaaagaacaacgggtcttatgtactcgataattctttgaccaatgctggcactggctccagttcaaagtcagccgttaaccataacggtgaaactactaaacgaactgatgaaaagaattacgttaatcaaaacaataacaatgaaggaaataccaagtactccagtaacggcaacggaaatcgaagtgatattagtcgtggtaatcaaaataatgccttaaattcgagaagtaaacagtctgctgagccacaaaaaaattcaagcgccaacgctagaaaagaatctagtggtggttgttgtataatttgttga

SEQ ID NO: 286 - protein, 309 aa, Saccharomyces cerevisiae
MQGNKSTIREYKIVVVGGGGVGKSALTIQFIQSYFVDEYDPTIEDSYRKQVVIDDKVSILDILDTAGQEEYSAMREQYMRTGEGFLLVYSVTSRNSFDELLSYYQQIQRVKDSDYIPVVVVGNKLDLENERQVSYEDGLRLAKQLNAPFLETSAKQAINVDEAFYSLIRLVRDDGGKYNSMNRQLDNTNEIRDSELTSSATADREKKNNGSYVLDNSLTNAGTGSSSKSAVNHNGETTKRTDEKNYVNQNNNNEGNTKYSSNGNGNRSDISRGNQNNALNSRSKQSAEPQKNSSANARKESSGGCCIIC

SEQ ID NO: 287 - DNA, 969 bp, Saccharomyces cerevisiae
atgcctttgaacaagtcgaacataagagagtacaagctagtcgtcgttggtggtggtggtgttggtaaatctgctttgaccatacaattgacccaatcgcactttgtagatgaatacgatcccacaattgaggattcatacaggaagcaagtggtgattgatgatgaagtgtctatattggacattttggatactgcagggcaggaagaatactctgctatgagggaacaatacatgcgcaacggcgaaggattcctattggtttactctataacgtccaagtcgtctcttgatgagcttatgacttactatcaacagatattgagagtcaaagataccgactatgttccaattgtggttgttggtaacaaatctgatttagaaaacgaaaaacaggtctcttaccaggacgggttgaacatggcaaagcaaatgaacgctcctttcttggagacatctgctaagcaagcaatcaacgtggaagaggcgttttacactctagcacgtttagttagagacgaaggcggcaagtacaacaagactttgacggaaaatgacaactccaagcaaacttctcaagatacaaaagggagcggtgccaactctgtgcctagaaatagcggtggccacaggaagatgagcaatgctgccaacggtaaaaatgtgaacagtagcacaactgtcgtgaatgccaggaatgcaagcatagagagtaagacagggttggcaggcaaccaggcgacaaatggtaagacacaaactgatcgcaccaatatagacaattccacgggccaagctggtcaggccaacgctcaaagcgctaatacggttaataatcgtgtaaataataatagtaaggccggtcaagtttcaaatgctaaacaggctaggaagcagcaagctgcacccggcggtaacaccagtgaagcctccaagagcggatcgggtggctgttgtattataagttaa

SEQ ID NO: 288 - protein, 322 aa, Saccharomyces cerevisiae
MPLNKSNIREYKLVVVGGGGVGKSALTIQLTQSHFVDEYDPTIEDSYRKQVVIDDEVSILDILDTAGQEEYSAMREQYMRNGEGFLLVYSITSKSSLDELMTYYQQILRVKDTDYVPIVVVGNKSDLENEKQVSYQDGLNMAKQMNAPFLETSAKQAINVEEAFYTLARLVRDEGGKYNKTLTENDNSKQTSQDTKGSGANSVPRNSGGHRKMSNAANGKNVNSSTTVVNARNASIESKTGLAGNQATNGKTQTDRTNIDNSTGQAGQANAQSANTVNNRVNNNSKAGQVSNAKQARKQQAAPGGNTSEASKSGSGGCCIIS

SEQ ID NO: 289 - DNA, 930 bp, Saccharomyces cerevisiae
atggcgagtgtaccaagtctatgcgacatactgataccgctagaaaagaatagtcgcagcgacggcgatgctgaaagtagcaatacagtgctgattcaactgcgaaaagggcatcacgaacggatgcgttctccttacacaatacaaaagttttacaaatttctaaaaagagctcattgtgaggaaaatttagaatttttcgaaaaagctcatcagttcctccagcttaagcaaaacaggagtattagcgaggagaagctcttggaagtttggaacaagtcgttgtacataaaatacattgccgtggactcccccaaagaatgcaacttttcacaggatactagggagatatttgagaagtgctttgctaacaatgaagtacctgccgacgtagacgtcctgtgtgccattagccatgtgatgggcctattaatggacgggtatcaccgatttgtgagttctgttaatgagaaaaagtactccgccacatatgcccacaatgactctgctacggaacaagatctcaaaaacgagtctacaacttctttttcgtcattaggcgtggaggatatttctgaagatagaaattcgtatcttaagaagcctgatatcaatggtttgtcaactatcattcaagaaacgtctgcaaacacgaccaatgagtcgcaatgcagcgatcgcacttctcggccaagcgagtcctcttcctcactcaacactaccagctcgacctacaagaataccagcactagaaatctgcaaaaaccgcaaaatacaggaattctcaactcggggaaaggtttattgcaaaaacttaactttgttaaaaaacggaaatctttcaaacagccttcaggcgtcatttgtagccattataacagcaatgttcaaaaccgtttgaaaggacaaaacagtcatcaacaaagatag

SEQ ID NO: 290 - protein, 309 aa, Saccharomyces cerevisiae
MASVPSLCDILIPLEKNSRSDGDAESSNTVLIQLRKGHHERMRSPYTIQKFYKFLKRAHCEENLEFFEKAHQFLQLKQNRSISEEKLLEVWNKSLYIKYIAVDSPKECNFSQDTREIFEKCFANNEVPADVDVLCAISHVMGLLMDGYHRFVSSVNEKKYSATYAHNDSATEQDLKNESTTSFSSLGVEDISEDRNSYLKKPDINGLSTIIQETSANTTNESQCSDRTSRPSESSSSLNTTSSTYKNTSTRNLQKPQNTGILNSGKGLLQKLNFVKKRKSFKQPSGVICSHYNSNVQNRLKGQNSHQQR

SEQ ID NO: 291 - DNA, 630 bp, Saccharomyces cerevisiae
atgtcacaacaagttggtaacagtatcagaagaaagctggtaatcgttggtgatggtgcctgtggtaagacatgtttattaatcgtcttttccaagggccaatttccagaagtctacgtaccaactgtctttgaaaactatgtagcagatgttgaagttgatgggcgtcgtgtagagctagcgctatgggataccgctggtcaagaagattatgatagactaagaccattgtcatacccagactccaatgtcgtattaatttgtttctctatcgatcttccagattctttagagaatgtacaagaaaaatggattgccgaagtattacatttctgtcaaggtgtgccaattattcttgttggttgtaaagtggatttgagaaacgacccacaaaccattgaacaattaagacaagaaggtcaacaacccgttacatcacaggagggacaatctgtagcagaccagattggcgcaaccggatactacgaatgttcggccaagactggttatggtgtcagagaagtgtttgaggccgccactagagcttcattgatgggtaaatctaaaacgaatggtaaagctaagaagaacactactgaaaagaagaagaagaagtgtgtcttgttatag

SEQ ID NO: 292 - protein, 209 aa, Saccharomyces cerevisiae
MSQQVGNSIRRKLVIVGDGACGKTCLLIVFSKGQFPEVYVPTVFENYVADVEVDGRRVELALWDTAGQEDYDRLRPLSYPDSNVVLICFSIDLPDSLENVQEKWIAEVLHFCQGVPIILVGCKVDLRNDPQTIEQLRQEGQQPVTSQEGQSVADQIGATGYYECSAKTGYGVREVFEAATRASLMGKSKTNGKAKKNTTEKKKKKCVLL

SEQ ID NO: 293 - DNA, 1878 bp, Saccharomyces cerevisiae
atggtgccattggaagatctgcttaataaagaaaatggcactgccgcacctcaacacagccgggagagtatagtagaaaatgggacagacgtttctaacgtcacaaagaaggacgggctgcccagtcctaacctatctaaaaggtcttctgattgttcgaagaggcctagaattaggtgtaccacggaagctattggcttgaacggtcaagaagatgaacggatgtcaccaggcagcacttcttcatcatgcttaccatatcatagtacttcacacttgaacactcctccatacgatctattgggcgcttcggcagtttcacccaccacatcatcttcctctgactcgtcctcctcctcgccattggcacaagcgcataacccggcaggtgatgacgacgatgcggataatgacggtgattctgaggatataacactatattgtaaatgggacaactgtggtatgattttcaaccaaccagagctgctatataatcatctgtgtcatgaccatgttggcaggaagtcacataagaacctacaattgaattgtcattggggagactgtaccacgaagacggagaaaagggaccatatcacctcgcatttgagagttcacgtaccattgaaaccgttcggttgctctacgtgctccaaaaagtttaaacgtccgcaagatttaaaaaagcatttgaaaattcatctggaaagtggcggtattttgaaaagaaagaggggacccaaatggggctcaaaaagaacttctaagaaaaacaaaagttgtgcaagcgacgcagtgtcgtcttgttctgcatctgtgccttccgctatagctggtagctttaagtcacattctacttctccacagatattacccccattgcccgtgggtatatctcaacatctgccttcacaacagcagcagcgggctatttccttaaaccaactatgctcagacgagctatctcagtataagccggtatattctccacaattgagtgccagattgcaaacgatcttgccgccattatactacaataacggcagcacggtaagccaaggtgccaacagtcggagcatgaatgtctacgaggacggttgttctaataagaccatagcaaacgccacccaattcttcaccaaactatcgagaaatatgacaaataactacattttgcaacaaagcggtggtagtactgagtcctcgtcatcatctgggcgcatccccgtagcacaaacaagctatgtgcagccacctaatgctccttcataccaatccgtacaaggtggtagctctatttcggccactgcaaatacagcaacttatgtgccagtacggttggccaagtatccaactggtccttcgcttactgaacatttgccacctttacattcgaacactgccggtggtgttttcaaccgccaatcacagtatgctatgccacactatccatctgttcgtgctgcgcctagctattcctccagtggctgttctatattaccgcctctacaatcaaagataccaatgttaccatcgcgccgtacaatggcaggtggaacttcattgaagcctaactgggaatttagcctgaaccaaaaaagctgtactaatgatattatcatgagtaagctggcgattgaagaagtagatgacgaaagcgagatagaggatgatttcgtagagatgttgggtatagtgaacattatcaaggactacttgttgtgctgtgtcatggaagatttagatgatgaagaaagtgaggacaaagatgaagaaaacgcattcttgcaagaatctttagaaaaattgagtttacaaaaccaaatgggaactaactcagttcgcatcttgaccaagtatcccaaaattttggtatga

SEQ ID NO: 294 - protein, 625 aa, Saccharomyces cerevisiae [sequence omitted]

SEQ ID NO: 295 - DNA, 2184 bp, Saccharomyces cerevisiae
atgaatgattggcatgagttcaatgccgcgataaagtcaatatattgtaatgcagaaggtgactcaagcagtataattaatagattggttggcttggcaatgaaaagcgaagattccacttttattgaggccgttttagttttgaaagaaaatgtgtcgaaagtagataaacaattaagatttttatggcttacttcaactattaattcaaggttttatccccctatacctatctcagaagcctcaccggtttcttggaataaaaccgaatattgcgcacctggtactgaagaactacaaaggcgttatccagggagagccaagttacagaatgaagaagactattcaggcggaatagaacaatgccgagatgtgccagattgctcattagttgcttctctaattaatcttaggtctaagaacttgaatctccctctaattaaacaaatatcatcaactaaatatcacgtcaatttaagttttaacggaagcaacaaaaggctagtgacagtagatatttcgcagatcccaacctcagtggatggcaaacaactttctttaaagagtaacgatatttcggacaaaattggagagcttgcattactgcttgtttctaaaggaacatattccacggatggctcaaatattagtatagatacttaccgcttaagtggcttcttaccagagataacacaagtaaacagctatcctttcgaaaaattatggaagtttcacaaatctaatttatgtctgatgggcgctggcaccgggaatcgttccaatgacatgataaagcccctagttgagaaccatgattactctataattgatatcacatatgattctaggctagtaaaattgcgagatccgaggaactcggcactaaatgttgaaatcagctatgaacagtatttaaaaaatttcaaacaactttatcttaattggaaccaagaaaaattattcaaacgttctcaggtacttcattttcggtacgatacttcacgctacaataaattttctatcgttgcagataaacctttatttcacctggtaaacaattctaaagtgacagagacggtatggttattgctagaatcccatttgcaagatgaaggcagccaagaaaatcggtcagtttcctttttgaatgaggctcccgaatgcataatttgtccaattgaacctccagtagaatgcggtggcaatcacattggacttcagctggtaaagttgagattagatgctgagactgagaggttattgtattgttattcaacaacaaacaacaatttcagtattcactctttctcagttgtgaaggaaatatgttttcaaagattgaaagatacaaaaagtctttttgccaaagtccttttctcttttccttatgaaatagagggaaaagcctcatttgatacttgtaatttttttcaaaatccgacttttgagttggaagttcactctgaacaagattatcaagtacttatggacgccgcatgtatctcaactagctcacatgatttaattaacatccaagtatattactttaatgactatgaattgataaagccaataatgtttgataaccactatcagcccgggcagggccttaaacaagacgtgcccatcttaactaatgtcaaatatatgattgtatgctcaacttacggccctccagcctcaacggaatttgaattacttgcctcgatacggttatcctcttcatggaggttaatatctggaataactttacggagtgttaacttgatatacggtacttatccatatcattgtcgcaacaggttccattggaaggaaacttcagacaaacttaaaattcagatgactttgccaaccaaaaagtattctacgaacaaactttttatacgtgtagtacccgtggaatcatcagcacgattaaggatgcgatgtaatattttcgagcctgaatcagctctctgtgtttatgaatgtcaagagtataggacatgtccatctgggggcatcgttatacctgatctggaagtctctcgtactaacattgttgtattgatgatagaaagaagtgtacctatttccagttgtttacctacggaaggacaattggatgaattggagttgtttgttgggtccagtcaaaaaatcagaattgaaaaatactccgatgatgtgataccaaaataa

SEQ ID NO: 296 - protein, 727 aa, Saccharomyces cerevisiae
MNDWHEFNAAIKSIYCNAEGDSSSIINRLVGLAMKSEDSTFIEAVLVLKENVSKVDKQLRFLWLTSTINSRFYPPIPISEASPVSWNKTEYCAPGTEELQRRYPGRAKLQNEEDYSGGIEQCRDVPDCSLVASLINLRSKNLNLPLIKQISSTKYHVNLSFNGSNKRLVTVDISQIPTSVDGKQLSLKSNDISDKIGELALLLVSKGTYSTDGSNISIDTYRLSGFLPEITQVNSYPFEKLWKFHKSNLCLMGAGTGNRSNDMIKPLVENHDYSIIDITYDSRLVKLRDPRNSALNVEISYEQYLKNFKQLYLNWNQEKLFKRSQVLHFRYDTSRYNKFSIVADKPLFHLVNNSKVTETVWLLLESHLQDEGSQENRSVSFLNEAPECIICPIEPPVECGGNHIGLQLVKLRLDAETERLLYCYSTTNNNFSIHSFSVVKEICFQRLKDTKSLFAKVLFSFPYEIEGKASFDTCNFFQNPTFELEVHSEQDYQVLMDAACISTSSHDLINIQVYYFNDYELIKPIMFDNHYQPGQGLKQDVPILTNVKYMIVCSTYGPPASTEFELLASIRLSSSWRLISGITLRSVNLIYGTYPYHCRNRFHWKETSDKLKIQMTLPTKKYSTNKLFIRVVPVESSARLRMRCNIFEPESALCVYECQEYRTCPSGGIVIPDLEVSRTNIVVLMIERSVPISSCLPTEGQLDELELFVGSSQKIRIEKYSDDVIPK

SEQ ID NO: 297 - DNA, 5313 bp, Saccharomyces cerevisiae
atgttcaatagaagtaacaccgcaggcggatctcaggctatgaaagagggacttggcataaacaagctctccccgatatcatcgaattcgaacccaagctcattgacttcctccaattatgaaaaatatctgcagctggccacagagaagaatccgtgtatgatcttggagctggaactggacggcaaggtgcgatatggctctccacagtggaacacgatcacaggagtcgccgatgatagtggctcttctccgacgtacattgcagaccttattctcggatccgatcaagataaaggtgtctttcaaaaggccacagacatgctgctcatgaatgatgacaccagttgcactataacgttcaagataaaggcagccgactatgaaggtagcgcaggctgtgacgatgaaagtacgataacgaccttggaagcacgtggtatcttaatcagggatggccacacacagttgccctctcacacgatgtggatagtcaagcctcgcacaaacgactggtcagacttttatgccaacgaagacgctcaagacgacatggtcatccagttatccgataattgcgacgatatcgatatccaacttcccgaagagttcgccaagacgcttgggttcggcgctaagatcttcgtgcagtacttgaagagaatacgactggaaatgataatagacgagttcaatctacctctgccaaaaatggaactatgccgggtctgtgagaactttgtccctgtttggtggttggagacccattcgcaaagttgcgtttgcgagcatagaacggaatcgctcatacaattactacacgataatcttcttgagcaacaggcgatcttggcaaacttcacgaaagattcagagtataagggcagtcagatacaggtacgttccaacaacttccttaaccaagttttagactccttaagagagctgtgtcaggacgccatagatatcaacccgagtgaaatggttcctgatctttaccacagtctttcaacatttcctcaagataatggtaataataacaataataataataataataataataataacaatgctttgttagatcaattccctatccaaaaagatacagttagcttgaattcatattttcagttttccccaaggactaaccacaacattcaaaacgtcacgtcgtggcaatcaagattttttctcaatgatgatcaggatcctggactagctcttttgattcacgatactctggacttggcaaggaaaaaagtggatgccgtgttgaggttggataacgcaatgacctattctttaaagattaaaaacgaggtcaacaactatgtggtacaactgatccgcgagcaaattgaaataaataagcatgcaatcctaactcacccaatgaatttaaggtcttcttccatatttcattccccactgccgcaaattcactctcaacaaccagaagccgagaatctcatatattcctcctctactcccctgcaagtccaacacgaccaatgtgcgtcctttgaagcaccctccaagtctcatctggagcctattcctttcccggtttcttccattgaagaaacaccaactgcaaatgatatcaggcatccttctcctttgccccgtagttgtagcaacaccgttatgaaactaccgacacctcgaaggaaacttgactcaaacggattattctctgatgcctatttaaacgctgacatcattccgaacccaagtatcgaatccacgatatctattgatagagataataacactaatagtaggggtagtagtatgaaacagtatggtattggtgaagccaccgactctcggactagtaactcggaaagaccttcttcctcttcgtcaaggctggggataagatcaagatccataacaccaagacaaaagatagaatactcacatgtagataatgatgaccgcaccaacgaaatgctgtctagagataaagattctcttcaacctcaaccttccgtagataccaccataacatcctctactcaggcgaccaccacgggtaccaagactaatagtaacaattccacaaactcagtattaccaaaactaatgacaagtatttccttgaccccaaggcgtggttcaccatcatttggtaatctcgcaagccattctatgcagcagacaaacagttttaaactgattcatgataaatcgccgatatcttcacctttcacattctccaaggattttttaaccccagagcagcacccttccaatattgccagaacagatagtatcaataatgcaatgttaacttcaccgaatatgccattatcaccccttttattggccacaaaccaaactgttaaatctccaacgcctagcataaaagattacgatatcttgaaaccaatcagcaaaggtgcttatggtagtgtttatctagcacggaaaaaactcacaggagattattttgctataaaggttctaaggaaatcagatatgattgccaaaaatcaagtaacaaatgtcaaatccgagagagcaatcatgatggttcaaagtgataagccctatgttgcgagactatttgctagtttccaaaataaagataaccttttcttagtgatggaatatttaccaggtggagatttggccactttaatcaagatgatggggtatctgcccgatcaatgggccaagcaatacctaaccgaaatcgttgtcggtgtgaatgatatgcatcaaaatgggatcattcatcatgacttaaagcctgaaaatctactaattgataatgcaggtcatgtgaaattaacagatttcggtttatcaagagctggtctgattcgccgtcacaagtttgtcccacataagtcgtcgctaagtatcagttccactttaccaatcgataacccagcaaataattttaccatgaacaacaacaatagtaatcattctcaattatcaaccccagatagcttcacatcagatcataagcagtataatagaagcaagaagtcatcactaggtcagcaatacgaacactcagaatactcaagtacttccaattcccactcaatgacgccaacgcccagtacgaacactgttgtttatccttcatattaccgtgggaaggacagatcacacggaagttcgaacatcgatctcccagcgtcccttagaagaagtgaatctcaattatcattttccctccttgatatttctcgttctagtactcctcctttagcaaatcccacaaattcgaacgctaataatattatgagaaggaaatcactcactgagaataaatccttttctaatgacctattatcttcagatgctatcgcagctaccaatacgaatattaactcgaataataacatttccctttcgccagcaccttcggatttagctttgttttatcctgatgatagcaagcaaaataagaaattttttgggactcccgattatctcgctccagaaactattgaaggaaagggtgaagataacaagcaatgcgactggtggtcagttggttgtatatttttcgaattacttttagggtatcctccattccatgcagaaacaccagatgctgtttttaagaaaattctatcaggagtcattcaatggccagagtttaaaaatgaagaagaagagcgagaattcctaacaccagaggcaaaagatttgatagaaaaattgttggttgtggatcctgcgaaaagactgggtgcgaaaggaattcaagaaattaaagatcacccttatttcaagaatgtggattgggatcatgtttacgatgaggaagcttcttttgtccctacaatagacaatccagaagatactgattattttgacctaaggggtgcagagctccaagattttggagacgatatcgaaaacgataatgccaatattttgtttggtaaacatggcattaacaccgatgtttctgaattatctgcagctaatctctctccaccattgaatcataaaaatattttatcccgtaaactatcgatgagtaacaccactaataggagctcaaataattccaacagtagcgtgcatgactttggtgcacatacaccggttaataaattaagtattgcttctgtattagagtcagtacctcaagaaacaggatatattacacctaacgggaccggtacaactactacaagtgccaaaaactcacccaatctgaagaatttgtcactggctatacctccacatatgagggatcgcagatcaagtaaattgaatgattcacaaacggaatttggttcttttaatttcaggaatttatcggctcttgataaagctaataaagatgctataaatagactgaaaagtgaacatttttctgaacaacctggggttcacagaagaacctcttctgcgtcactaatggggtcatcctcagacggatcagtgtcaactccagggagtaacgcttcaaacactacatctggtggcaagttgaaaatacataagcctaccatatccggttctccttcaacatttggcacatttcccaaaacatttttgaggtctgattcattctccacaagatcatattctcctgaacgaagtattagtatcgactcgtcaacattatcaaggaagggtagtataatcggggataaccaacaaacaacagcaaatagctcggattcacctacgatgactaaattcaagtcgccactatcacctgctaataccaccaccgtgagctcatatttttcaagacagagggttctatcaaagagtttttcgcaacggaccaattccagtgatctctcggcagaggaaagcgaccgactacaggctatatcaagagttaactctttaagaaacaggaggcgtagtggccgaaagagctcgagcacttctgagattggataccacatggatgttcttgtttgtgagcctataccgattcatagatatcgggttactaaagacttagaaaatttgggctgtaccgtcgtcagtgttggtgccggtgatgaactagttagtagagccactagtggtgtaagttttgacttaattatgacagccttgaagcttccaaaacttggtgctattgacattgttcaactactaaagcaaacaaatggtgctaattcgacaacaccaattgtggccataacaaattattttcaggaggcggcaaccagtagagtctttgacgatgttttagaaaaaccggtaaaacttgacgagctaaaaaaattggtggctaagtacgcactgaaaaagtctcaagaagatgaagagcatactatattgagcgattctgatgaaacgcactga

SEQ ID NO: 298 - protein, 1770 aa, Saccharomyces cerevisiae
MFNRSNTAGGSQAMKEGLGINKLSPISSNSNPSSLTSSNYEKYLQLATEKNPCMILELELDGKVRYGSPQWNTITGVADDSGSSPTYIADLILGSDQDKGVFQKATDMLLMNDDTSCTITFKIKAADYEGSAGCDDESTITTLEARGILIRDGHTQLPSHTMWIVKPRTNDWSDFYANEDAQDDMVIQLSDNCDDIDIQLPEEFAKTLGFGAKIFVQYLKRIRLEMIIDEFNLPLPKMELCRVCENFVPVWWLETHSQSCVCEHRTESLIQLLHDNLLEQQAILANFTKDSEYKGSQIQVRSNNFLNQVLDSLRELCQDAIDINPSEMVPDLYHSLSTFPQDNGNNNNNNNNNNNNNNALLDQFPIQKDTVSLNSYFQFSPRTNHNIQNVTSWQSRFFLNDDQDPGLALLIHDTLDLARKKVDAVLRLDNAMTYSLKIKNEVNNYVVQLIREQIEINKHAILTHPMNLRSSSIFHSPLPQIHSQQPEAENLIYSSSTPLQVQHDQCASFEAPSKSHLEPIPFPVSSIEETPTANDIRHPSPLPRSCSNTVMKLPTPRRKLDSNGLFSDAYLNADIIPNPSIESTISIDRDNNTNSRGSSMKQYGIGEATDSRTSNSERPSSSSSRLGIRSRSITPRQKIEYSHVDNDDRTNEMLSRDKDSLQPQPSVDTTITSSTQATTTGTKTNSNNSTNSVLPKLMTSISLTPRRGSPSFGNLASHSMQQTNSFKLIHDKSPISSPFTFSKDFLTPEQHPSNIARTDSINNAMLTSPNMPLSPLLLATNQTVKSPTPSIKDYDILKPISKGAYGSVYLARKKLTGDYFAIKVLRKSDMIAKNQVTNVKSERAIMMVQSDKPYVARLFASFQNKDNLFLVMEYLPGGDLATLIKMMGYLPDQWAKQYLTEIVVGVNDMHQNGIIHHDLKPENLLIDNAGHVKLTDFGLSRAGLIRRHKFVPHKSSLSISSTLPIDNPANNFTMNNNNSNHSQLSTPDSFTSDHKQYNRSKKSSLGQQYEHSEYSSTSNSHSMTPTPSTNTVVYPSYYRGKDRSHGSSNIDLPASLRRSESQLSFSLLDISRSSTPPLANPTNSNANNIMRRKSLTENKSFSNDLLSSDAIAATNTNINSNNNISLSPAPSDLALFYPDDSKQNKKFFGTPDYLAPETIEGKGEDNKQCDWWSVGCIFFELLLGYPPFHAETPDAVFKKILSGVIQWPEFKNEEEEREFLTPEAKDLIEKLLVVDPAKRLGAKGIQEIKDHPYFKNVDWDHVYDEEASFVPTIDNPEDTDYFDLRGAELQDFGDDIENDNANILFGKHGINTDVSELSAANLSPPLNHKNILSRKLSMSNTTNRSSNNSNSSVHDFGAHTPVNKLSIASVLESVPQETGYITPNGTGTTTTSAKNSPNLKNLSLAIPPHMRDRRSSKLNDSQTEFGSFNFRNLSALDKANKDAINRLKSEHFSEQPGVHRRTSSASLMGSSSDGSVSTPGSNASNTTSGGKLKIHKPTISGSPSTFGTFPKTFLRSDSFSTRSYSPERSISIDSSTLSRKGSIIGDNQQTTANSSDSPTMTKFKSPLSPANTTTVSSYFSRQRVLSKSFSQRTNSSDLSAEESDRLQAISRVNSLRNRRRSGRKSSSTSEIGYHMDVLVCEPIPIHRYRVTKDLENLGCTVVSVGAGDELVSRATSGVSFDLIMTALKLPKLGAIDIVQLLKQTNGANSTTPIVAITNYFQEAATSRVFDDVLEKPVKLDELKKLVAKYALKKSQEDEEHTILSDSDETH

SEQ ID NO: 299 - DNA, 720 bp, Saccharomyces cerevisiae
atggttagcatgatccatattgtggtgtttttgctagcaatcacaaccatgttcgaaatacttccgctaataaccgtccccgtgaccaagtacctatcgttatcgtcattcagaaaccactattatggcctgtttggctggtgtgtacgtggtcaaaaccaagaattgatgtgcacgaaaatgaagataggatatgacagtacagatgtcgactcctccgggcacgttttgaccctgccatcgaactcaaaagtggtcgtctccaatttattagtggttcacccgatttcactggcattcacaggaacgctattaattttagcagtgattatcatggtaactccactaggggactcacctgagatgttattgttcacggcccttttttcgctgccaacgttcatgctatgtcttttatgttttttggtagatattcttctgttcatctccaaactggactggcccggctggctaatgctagccgctactattagcgtagcactttgttgttccatgctgtgggtcatgagaagagttgtgtcagtcaaaaaatatgaatcgcaacagtcaattgcgcatgcgtgctcaatggaacagtactcaatttccgacatttaccagagtaaacagaacggcaatagctcagaatatgaagtggctccaacacatacagatagtctgattgctccagaagtgacatatagagggttcattgaataa

SEQ ID NO: 300 - protein, 239 aa, Saccharomyces cerevisiae
MVSMIHIVVFLLAITTMFEILPLITVPVTKYLSLSSFRNHYYGLFGWCVRGQNQELMCTKMKIGYDSTDVDSSGHVLTLPSNSKVVVSNLLVVHPISLAFTGTLLILAVIIMVTPLGDSPEMLLFTALFSLPTFMLCLLCFLVDILLFISKLDWPGWLMLAATISVALCCSMLWVMRRVVSVKKYESQQSIAHACSMEQYSISDIYQSKQNGNSSEYEVAPTHTDSLIAPEVTYRGFIE

SEQ ID NO: 301 - DNA, 2031 bp, Saccharomyces cerevisiae
atgggtagacggaagattgaaatccagagaatttctgatgacagaaatagggctgtcacgtttataaaacgtaaagctggcctttttaagaaggcccatgaactatccgttctttgtcaagtagacatagccgtcattatactggggtccaataacacgttctatgagttttcctctgtggatacgaatgatttaatctatcactaccaaaatgacaaaaacttgcttcacgaagtgaaagatccttccgattatggagactttcacaaaagtgcatccgttaacataaatcaagacctactcaggtcgtctatgtcaaataagccttcgaaatcaaatgttaaaggaatgaaccagtcagaaaatgatgatgatgagaacaatgatgaggacgacgatgatcatggcaattttgagaggaattcaaatatgcattcgaataaaaaagcctctgataaaaatataccgagtgcacacatgaagttgttatccccgaccgcactcatttcaaagatggatggtagtgagcaaaataaacgtcatcctgagaacgcgctgccgcctttacaacatttgaaaagattgaaaccggatcctttgcaaataagtagaactccgcaacagcaacagcagcaaaatatatcgagaccataccatagtagcatgtacaatcttaaccagccttcatccagttcatcttctccttccacgatggattttccaaaattaccaagctttcaaaactcttcctttaatggtcgtcctccacccatttccatttcaccgaacaagttcagtaagccatttacaaatgcatcctcaaggacccctaaacaggagcacaaaattaacaatagtggcagcaataataatgacaacagcaactacactcagtcaccatctaattctttggaagactctattcagcagactgtcaaagcaagaaggaaattgtccgccagaccggtacttcgtgtgagaattccgaacaacaatttcagcagtaattccgctattccaagtgaaccctcctctgcctcctccacatcggccaacggcaatagtatgggctcttcgcagataatgaaagaaaacaaaacaagtaggtctagcaaaatttctccactatccgcatctgcctcaggccccttaactctccaaaaaggtaataatggcagaatggtaataaaattgccaaatgcaaatgcgcctaacggttctaacaatggtaatggcagtaacaataacaatcacccttatcctttcggaagtgggtcttcacctcttttttctgcaacacagccatacattgccactcccttgcaaccatcgaatattcctggcggacctttccaacaaaatacatcttttttagctcaaagacaaacccagcaataccaacaaatgtctttcaaaaaacagagccaaacagtaccattaactacaacattaaccggacgccccccttcaactttttccggccctgaaaccagcaatggccctccaactggttcactgccatcgaagttcgtacatgatttgatgagtaattctccaaatgtttcttctatatcgatgtttccagactggtcaatgggacccaacagtgccaagccgggaaacacaaacaatcctggtactttccctcccgtacagacggccgtaaacaacggcaactccagcaatatcagcagcactaacaacactaacaacaacaacaacaataacaacaacaacagcagcaacaacaacagcaacaacggcaacgacaataacagtaacaatagcaataacagttactatagtaataatgaagatgcacccgtaaatggagctgctatttcagaacatactaccgatggtgactcgaacaatcagtccaactcaagtacatatgatgctgctgccaccgcatataatggaaataccgggctgactccatacataaatactgctcaaacaccactaggcactaaattctttaatttttcgactgatatttcaggagaaaaaaattcaagcaaaatataa

SEQ ID NO: 302 - protein, 676 aa, Saccharomyces cerevisiae
MGRRKIEIQRISDDRNRAVTFIKRKAGLFKKAHELSVLCQVDIAVIILGSNNTFYEFSSVDTNDLIYHYQNDKNLLHEVKDPSDYGDFHKSASVNINQDLLRSSMSNKPSKSNVKGMNQSENDDDENNDEDDDDHGNFERNSNMHSNKKASDKNIPSAHMKLLSPTALISKMDGSEQNKRHPENALPPLQHLKRLKPDPLQISRTPQQQQQQNISRPYHSSMYNLNQPSSSSSSPSTMDFPKLPSFQNSSFNGRPPPISISPNKFSKPFTNASSRTPKQEHKINNSGSNNNDNSNYTQSPSNSLEDSIQQTVKARRKLSARPVLRVRIPNNNFSSNSAIPSEPSSASSTSANGNSMGSSQIMKENKTSRSSKISPLSASASGPLTLQKGNNGRMVIKLPNANAPNGSNNGNGSNNNNHPYPFGSGSSPLFSATQPYIATPLQPSNIPGGPFQQNTSFLAQRQTQQYQQMSFKKQSQTVPLTTTLTGRPPSTFSGPETSNGPPTGSLPSKFVHDLMSNSPNVSSISMFPDWSMGPNSAKPGNTNNPGTFPPVQTAVNNGNSSNISSTNNTNNNNNNNNNNSSNNNSNNGNDNNSNNSNNSYYSNNEDAPVNGAAISEHTTDGDSNNQSNSSTYDAAATAYNGNTGLTPYINTAQTPLGTKFFNFSTDISGEKNSSKI

SEQ ID NO: 303 - DNA, 3468 bp, Saccharomyces cerevisiae
atgaatagtaatgaactggatctaagaaataaatatttttatgagatattcggtaagaaaagaaaatcagatacttcaacccctactcagttgttctccggctccaaagttcagacaaacatcaatgaaatttctatcactaacgatgaggatgaagatagtactgaagatgaaaataaggcttcattgaaggattatacactagggcacgacaccggtgcacggtataggatagcaccggactgttcttcccaccaattaaaggcatctcctgtcctacatatttcaacaaaccttaattcaagtccacaatccttcacaggcgatcagatttcacctactaataaaaaaatttcaataaatgattcgaccagacaagataaaggtaacagttgcactaccacttcatcaccttctcaaaaaagatcgaatgttttgcttcctcacgtaagaaaacattcatctccttcactattatcattttccaaaaacagtggcagtcatatgggggatccaaaccagctatctacgcctccaactcccaaaagtgcaggtcacacgatggagttacacagttcattcaatggaaaacatagttcttctagcacctcttctttatttgcattagagtcactgaaaacccaaaatagacgctcatcaaactcttccaatcattctagtcaatatcgacgccatactaatcaacaccaacgtcatcattcaaggtccaaatcaagtcctgtctctctgacggaaatatccatgatcaaaggcacgcctttggtttatcctgcacttttatcactaatagcaattaaattcaaacagaccatcaaattgagcacgcataaaaagatggggttactttacagagattcctttacaggaaaacaagcaattgatactttatgcttgatcataggaagcttagatcgtaatttgggcatgttgatcggaaaatcgctggaagctcaaaaattgttccatgacgtactttatgaccatggcgtaagagattctgtactggagatttacgagttatcttcagaatcaatttttatggcacatcagtcgcagagttctacttcaattgccaacacattttcttcatcatcttcttcagttaattcgctccgtactaaaactgaaatatatggtgtttttgtcccattgacacattgttattcctctacatgctctctggaaaaactttgctactctatttcttgccccaatcgtttgcaacaacaggctaatttacatttaaaattaggtggtggtcttaagagaaatatttcgttagcactcgataaggaggatgatgaacgaatttcctggacaaattctgtaccaaagagcgtatgggaatcattatccaaacaacaaatcaaaaggcaggaggcaatatatgagttgtttactacagaaaagaagtttgtaaaatctttggaaatcatccgagatactttcatgaagaaattattagaaacgaatattattccatctgatgtaaggataaattttgtaaagcacgttttcgcacatatcaatgaaatatattctgtcaatagagaatttttgaaggctttagcacaaaggcaatcattaagcccaatttgtcctggaattgcagatatatttttgcagtatcttcctttctttgatccttttctgtcatacatagcatcaagaccatacgcaaagtatctaattgaaacccaaagatcagttaatcccaattttgctcgttttgacgatgaagtgtctaattcttccctgaggcatgggatcgattcattcctatctcagggtgtttcaagacctggtagatattcactgttggtaagagaaataatacacttctcggacccagtaacagacaaagatgatctacaaatgctaatgaaagtccaagatcttttaaaggatctaatgaaaaggattgatagagcaagcggtgcagcacaagatcgttatgacgttaaagtgttaaagcagaaaattctattcaaaaatgaatacgttaatctgggtttgaataacgaaaaaaggaaaatcaagcatgaaggtttactctcaaggaaggacgtgaacaaaacagatgcgtccttttcaggagacattcaattttacctactcgacaatatgctattattcttgaaatcaaaagctgtaaacaagtggcaccaacacactgtatttcagagaccaattccactccctttactgtttatttgtccggctgaggatatgccacccataaaaagatatgtgacagaaaacccaaattgctcagcgggtgtgctcttaccccaatatcaaacgagcaatcccaagaatgctattgtattcgcctattacggtacgaaacaacaatatcaagttactttgtacgcgccgcagccggccggattacagacattaatagaaaaggtgaaacaagagcaaaaaaggctccttgatgaaactaaacatattacttttaagcaaatggtaggtcaattctttcactcatacataaatactaatcgcgtcaacgatgtcctaatctgtcatgctggtaaaattttattggttgcaacaaatatgggactctttgttcttaattatgctacatcgatcaatcaaaaaccagtgcaccttctgcacaaaatatcaatttcacagatctctgtattggaagaatataaagttatgattcttctaattgacaaaaaactgtacggctgtcctttagacgtaatcgacgatgcagaaaatgcagattttcttttcagaaaaaattctaaagtgttatttaaatatgttgcaatgttcaaagacggtttctgtaatggtaaaagaatcattatgattgcacatcattttttgcacgccgcacaattattgattgttaatcctttgatatttgattttaatagcggtaattttaaaaaaaacctaaaggcaggcttggtagattttagcgttgattctgaacctctgtccttttcttttttggagaataagatctgcattggttgtaaaaaaaatatcaaaatattaaacgtaccggaagtgtgtgataaaaatggatttaaaatgagggagcttttaaatctacatgataacaaagttttagcgaacatgtataaagagacgttcaaagtagtttccatgtttccgataaaaaattcaacttttgcatgttttccagaactctgcttttttctcaataagcaagggaagagggaggagacaaagggatgttttcattgggagggggaaccagaacagttcgcgtgttcctacccttatattgtggcaattaatagtaactttattgaaattagacatatagaaaatggagaacttgtccgctgtgtacttggaaacaagatacgtatgttaaaatcatatgccaagaagatcttatattgttatgaggatcctcaaggatttgaaattatcgaactgttaaatttttga

SEQ ID NO: 304 - protein, 1155 aa, Saccharomyces cerevisiae
MNSNELDLRNKYFYEIFGKKRKSDTSTPTQLFSGSKVQTNINEISITNDEDEDSTEDENKASLKDYTLGHDTGARYRIAPDCSSHQLKASPVLHISTNLNSSPQSFTGDQISPTNKKISINDSTRQDKGNSCTTTSSPSQKRSNVLLPHVRKHSSPSLLSFSKNSGSHMGDPNQLSTPPTPKSAGHTMELHSSFNGKHSSSSTSSLFALESLKTQNRRSSNSSNHSSQYRRHTNQHQRHHSRSKSSPVSLTEISMIKGTPLVYPALLSLIAIKFKQTIKLSTHKKMGLLYRDSFTGKQAIDTLCLIIGSLDRNLGMLIGKSLEAQKLFHDVLYDHGVRDSVLEIYELSSESIFMAHQSQSSTSIANTFSSSSSSVNSLRTKTEIYGVFVPLTHCYSSTCSLEKLCYSISCPNRLQQQANLHLKLGGGLKRNISLALDKEDDERISWTNSVPKSVWESLSKQQIKRQEAIYELFTTEKKFVKSLEIIRDTFMKKLLETNIIPSDVRINFVKHVFAHINEIYSVNREFLKALAQRQSLSPICPGIADIFLQYLPFFDPFLSYIASRPYAKYLIETQRSVNPNFARFDDEVSNSSLRHGIDSFLSQGVSRPGRYSLLVREIIHFSDPVTDKDDLQMLMKVQDLLKDLMKRIDRASGAAQDRYDVKVLKQKILFKNEYVNLGLNNEKRKIKHEGLLSRKDVNKTDASFSGDIQFYLLDNMLLFLKSKAVNKWHQHTVFQRPIPLPLLFICPAEDMPPIKRYVTENPNCSAGVLLPQYQTSNPKNAIVFAYYGTKQQYQVTLYAPQPAGLQTLIEKVKQEQKRLLDETKHITFKQMVGQFFHSYINTNRVNDVLICHAGKILLVATNMGLFVLNYATSINQKPVHLLHKISISQISVLEEYKVMILLIDKKLYGCPLDVIDDAENADFLFRKNSKVLFKYVAMFKDGFCNGKRIIMIAHHFLHAAQLLIVNPLIFDFNSGNFKKNLKAGLVDFSVDSEPLSFSFLENKICIGCKKNIKILNVPEVCDKNGFKMRELLNLHDNKVLANMYKETFKVVSMFPIKNSTFACFPELCFFLNKQGKREETKGCFHWEGEPEQFACSYPYIVAINSNFIEIRHIENGELVRCVLGNKIRMLKSYAKKILYCYEDPQGFEIIELLNF

SEQ ID NO: 305 - DNA, 4071 bp, Saccharomyces cerevisiae
atgagcgaaaccaacgttgacagcttaggggacagaaatgacatatactcccaaatatttggtgtagaaaggaggccagattccttcgctacttttgatagtgactcgcacggagacataagttctcagctgctgcctaatagaatcgaaaatatccagaatctaaatgttctgctttctgaagacattgctaatgacatcattattgccaagcagaggagacgttctggagttgaagccgccatcgatgattctgatataccaaataacgaaatgaaggggaaaagctcaaattacattttatcgcagcagactaatattaaggaagttccagatacacaaagtttgtctagtgctgataatacacctgtgagcagtccaaagaaggcaagagatgccacatcttcccatcccattgttcatgctaaatcgatgtcccatatatattcaacgagtaatagtgctagtagacaagccaagcactataatgaccaccctttgcctccaatgtctccaagaaatgaagtttaccagaagaataaaagtactacagcttttgtgcctaagaggaaaccttcgctcccgcaactagcacttgctggtcttaagaagcagagcagtttttccaccggcagtgcatcaaccactcctacacaggctagaaaatcgcctttgcaagggtttggtttcttttcgagaccaagttccaaagacttgcacgaacagcaccaacatcaccagcatattcagcataataatattaacaatcataataataataatactaataataatggcgcacattatcaagtgggtagtagtaacagtaattaccctcaacattcacattctatatcatctagatcgatgtcgttgaactcatctactctaaaaaatattgcatcatcttttcaatcgaagacttctaacagcaggaaagctacgcaaaaatatgatataacttccaacccattctcagatcctcatcatcatcatcatcatcatcactcttcaaacagtcacagtagcctaaataatgtccacgggtctggaaactcctcaagtgttatgggaagctcgtctaatattgggttgggtcttaaaacgagagtttcttccacctcattagctttaaaaagatacacttcggtttcaggaacttctctatcttctccacgtagaagtagtatgacacctttgtcggcatctagacctgttatgagcgcttcatcaaaaaaacctcaggtatatccagctttgttgtcaagagtcgccacaaaatttaaaagttcgatacaactcggggaacataagaaggatggattagtttaccgtgacgcatttacagggcagcaggcagtcgatgtcatctgtgctatcattagaacttctgatagaaacttagccttgttatttggtagatcactagatgcacaaaagctgttccatgatgtggtatacgagcacaggttaagagattcaccacatgaagtttacgaatttacagataactcaagatttacaggaacaggttccacaaacgcccatgatccactgatgctactcccaaactcatcatcttttaattccgggaaccactcttatccgaattccggaatggttccatcaagttcaacttcatctttgaatagtgatcaggcaactttgacagggtcgaggctacatatgagtagttcattgtcccagcaaaagaaccctgcagccattcataacgtcaatggtgtgtttacattactggcggaatgctattcccctacgtgcacaagagacgctttgtgttactctatttcgtgtccaagacgtcttgagcaacaagcaaggttaaatctgaaaccaaatggcggcctgaaacgtaatatatcaatggcattggatgatgatgacgaagaaaagccatcttggacaagttccgtatctaaagaggattgggaaaacttaccaaaaaaggaaataaaaagacaagaggctatttatgaagtttatatcacggagaagaactttgtaaaatcattagaaattacaagagacacattcatgaagactttggctgaaacaaatattatttcagcagatattagaaaaaatttcatcaagcatgtttttgcacatataaacgatatctattcagtgaatagacgttttttgaaggctttaactgataggcaaagaagttcaccagttgtgagaggaattggggacattgttttaagattcattccattttttgaaccatttgtttcatatgtcgcttcaagaccatatgcgaagtacttgattgaaacccaaagatcagtcaatccctattttgctagatttgatgacgatatgatgagctcctccttacgtcatggtattgattcgtttttatctcaaggtgtttcaagaccaggtcgatatatgctattggtcaaagaaatcatgaaatctactgaccccgagaaggacaaaagtgattatgaagatttaagcaaagccatggatgcattaagggattttatgaaaaggattgatcaagcaagtggtgctgcacaagatagacatgatgtaaaattgttgaaacaaaagattcttttcaaaaacgaatacgttaatttaggattaaatgacgaaaggagaaaaattaaacatgaaggtatactatcacggaaggagttgtcaaaatcggacggaacagttgttggtgacatacaattttatcttctagataatatgctcttatttttaaaggccaaagcagttaataaatggcaccagcataaggtattccaaaggcccattccattgccattgttatttgcatgtccaggtgaagatatgcctgcgttgaggaaatatattggagaccacccagattgttcaggaactgtaattcaaccagaatacaacacgagtaatcctaaaaacgcaataactttcttatactacggtgccaagcagagatatcaagttacattatatgctgcgcaatacgctggattgcaaacgcttttggaaaaaataaagcaaggacaagcagctattataagcaaaacggagatgttcaatgtaacgaaaatgagcgataggttcttcgattacaccaacaaaattaacagtgttacttcctgtgatgggggtagaaaacttctgattgcaacgaactctggattgtatatgagcaacattaaaagacagcagaataaagatcatagacataaaagctctgcttttttttcaactccaatccaactagtacaaagaaataatatcactcaaattgctgtattagaagaattcaaatcaatcatacttttaattgataaaaaattatacagttgtccgctgtcattaatcgaagcagaaggtaatgggacatctttcttcaaaaagcatcacaaggaactgatcaatcatgtgagtttcttcgcagaaggagattgcaatggtaagagattaatcgtgactgcacacagttcatcgcattcaattaagtacttcgagcatgaacatccattattggccgaaaaaaatggtagtggtagcggtaacaaaaaaagtctcaagaaaaaaatcaccgaggttatttttgattctgaacctgtctctatttcatttctcaaggccaacctatgcattggctgtaaaaagggttttcagatcgttagcatttcacagaatgctcatgaatccttgttagatccggccgatacatcattagagtttgcactaagggatactttgaaaccaatggcaatctatcgtgtgggaaatatgtttttgctgtgttacacagaatttgccttctttgtcaataatcagggttggagaaagaaagaatcgcatattattcattgggagggagagccccaaaaatttgcaatttggtacccgtacatcttggcattcgacagcaacttcattgagatcagaaagattgaaactggcgaattaattcgttgcgtccttgctgataagattcgacttctacaaacaagtactcaagaaatcctgtactgctacgaggattatcgcgggtatgatacagttgcgtcgttagatttctggggttaa

SEQ ID NO: 306 - protein, 1356 aa, Saccharomyces cerevisiae
MSETNVDSLGDRNDIYSQIFGVERRPDSFATFDSDSHGDISSQLLPNRIENIQNLNVLLSEDIANDIIIAKQRRRSGVEAAIDDSDIPNNEMKGKSSNYILSQQTNIKEVPDTQSLSSADNTPVSSPKKARDATSSHPIVHAKSMSHIYSTSNSASRQAKHYNDHPLPPMSPRNEVYQKNKSTTAFVPKRKPSLPQLALAGLKKQSSFSTGSASTTPTQARKSPLQGFGFFSRPSSKDLHEQHQHHQHIQHNNINNHNNNNTNNNGAHYQVGSSNSNYPQHSHSISSRSMSLNSSTLKNIASSFQSKTSNSRKATQKYDITSNPFSDPHHHHHHHHSSNSHSSLNNVHGSGNSSSVMGSSSNIGLGLKTRVSSTSLALKRYTSVSGTSLSSPRRSSMTPLSASRPVMSASSKKPQVYPALLSRVATKFKSSIQLGEHKKDGLVYRDAFTGQQAVDVICAIIRTSDRNLALLFGRSLDAQKLFHDVVYEHRLRDSPHEVYEFTDNSRFTGTGSTNAHDPLMLLPNSSSFNSGNHSYPNSGMVPSSSTSSLNSDQATLTGSRLHMSSSLSQQKNPAAIHNVNGVFTLLAECYSPTCTRDALCYSISCPRRLEQQARLNLKPNGGLKRNISMALDDDDEEKPSWTSSVSKEDWENLPKKEIKRQEAIYEVYITEKNFVKSLEITRDTFMKTLAETNIISADIRKNFIKHVFAHINDIYSVNRRFLKALTDRQRSSPVVRGIGDIVLRFIPFFEPFVSYVASRPYAKYLIETQRSVNPYFARFDDDMMSSSLRHGIDSFLSQGVSRPGRYMLLVKEIMKSTDPEKDKSDYEDLSKAMDALRDFMKRIDQASGAAQDRHDVKLLKQKILFKNEYVNLGLNDERRKIKHEGILSRKELSKSDGTVVGDIQFYLLDNMLLFLKAKAVNKWHQHKVFQRPIPLPLLFACPGEDMPALRKYIGDHPDCSGTVIQPEYNTSNPKNAITFLYYGAKQRYQVTLYAAQYAGLQTLLEKIKQGQAAIISKTEMFNVTKMSDRFFDYTNKINSVTSCDGGRKLLIATNSGLYMSNIKRQQNKDHRHKSSAFFSTPIQLVQRNNITQIAVLEEFKSIILLIDKKLYSCPLSLIEAEGNGTSFFKKHHKELINHVSFFAEGDCNGKRLIVTAHSSSHSIKYFEHEHPLLAEKNGSGSGNKKSLKKKITEVIFDSEPVSISFLKANLCIGCKKGFQIVSISQNAHESLLDPADTSLEFALRDTLKPMAIYRVGNMFLLCYTEFAFFVNNQGWRKKESHIIHWEGEPQKFAIWYPYILAFDSNFIEIRKIETGELIRCVLADKIRLLQTSTQEILYCYEDYRGYDTVASLDFWG

SEQ ID NO: 307 - DNA, 1107 bp, Saccharomyces cerevisiae
atgaatcctaaatcctctacacctaagattccaagacccaagaacgcatttattctgttcagacagcactaccacaggatcttaatagacgaatggaccgctcaaggtgtggaaataccccataattcaaacatttctaaaattattggtacgaagtggaagggcttacaaccggaagataaggcacactgggaaaatctagcggagaaggagaaactagaacatgaaaggaagtatcctgaatacaaatacaagccggtaagaaagtctaagaagaagcaactacttttgaaggaaatcgagcaacagcagcagcaacaacagaaagaacagcagcagcagaaacagtcacaaccgcaattacaacagccctttaacaacaatatagttcttatgaaaagagcacattctctttcaccatcttcctcggtgtcaagctcgaacagctatcagttccaattgaacaatgatcttaagaggttgcctattccttctgttaatacttctaactatatggtctccagatctttaagtggactacctttgacgcatgataagacggcaagagacctaccacagctgtcatctcaactaaattctattccatattactcagctccacacgacccttcaacgagacatcattacctcaacgtcgctcaagctcaaccaagggctaactcgacccctcaattgccctttatttcatccattatcaacaacagcagtcaaacaccggtaactacaactaccacatccacaacaactgcgacatcttctcctgggaaattctcctcttctccgaactcctctgtactggagaacaacagattaaacagtatcaacaattcaaatcaatatttacctccccctctattaccttctctgcaagattttcaactggatcagtaccagcagctaaagcagatgggaccaacttatattgtcaaaccactgtctcacaccaggaacaatctattgtccacaactacccctacgcatcatcacattcctcatataccaaaccaaaacattcctctacatcaaattataaactcaagcaacactgaggtcaccgctaaaactagcctagtttctccgaaatga

SEQ ID NO: 308 - protein, 368 aa, Saccharomyces cerevisiae [sequence omitted]

SEQ ID NO: 309 - DNA, 831 bp, Saccharomyces cerevisiae
atgggtactagcatagtaaatctaaaccaaaagattgaactgcccccaatccaggtcttattcgagtcacttaaccgagaaaatgaaacaaaaccccacttcgaggaacgcaggttatatcaacctaatccttcatttgttcctagaacaaatatagcagttggtagcccagttaacccggttccagtatcatcccctgtttttttcattggtccttctccacagagaagcattcagaatcacaacgctattatgactcaaaacatacgtcagtatccagttatatataataataaccgagaagttatatctacgggtgagagaaattacataataactgtaggggggcctccggtaacttcttcgcagcccgagtatgagcatatctcaactcccaatttctatcaagagcagagactggcacaacctcatccggtaaatgagagtatgatgataggtggttatacaaatcctcagcctattagcatttcccgaggtaaaatgctatccggcaacataagtacgaactcggtccgcggatctaataatggatattccgcaaaagaaaaaaaacataaggcacatggtaagaggtccaatttaccaaaggccaccgtttcaattctaaacaaatggttacatgagcacgtaaacaacccttacccaaccgtgcaggaaaaaagagaactgctcgcgaaaactggtctaactaaacttcaaatttccaattggttcattaatgctaggagaagaaaaatattttctggccagaatgacgcaaataatttcagaagaaaattcagttcttctacaaatttagctaagttctga

SEQ ID NO: 310 - protein, 276 aa, Saccharomyces cerevisiae
MGTSIVNLNQKIELPPIQVLFESLNRENETKPHFEERRLYQPNPSFVPRTNIAVGSPVNPVPVSSPVFFIGPSPQRSIQNHNAIMTQNIRQYPVIYNNNREVISTGERNYIITVGGPPVTSSQPEYEHISTPNFYQEQRLAQPHPVNESMMIGGYTNPQPISISRGKMLSGNISTNSVRGSNNGYSAKEKKHKAHGKRSNLPKATVSILNKWLHEHVNNPYPTVQEKRELLAKTGLTKLQISNWFINARRRKIFSGQNDANNFRRKFSSSTNLAKF

SEQ ID NO: 311 - DNA, 2475 bp, Saccharomyces cerevisiae
atgatgaatttttttacatcaaaatcgtcgaatcaggatactggatttagctctcaacaccaacatccaaatggacagaacaatggaaacaataatagcagcaccgctggcaacgacaacggatacccatgtaaactggtgtccagtgggccctgcgcttcatcaaataatggtgccctttttacgaattttactttacaaactgcaacgccgaccaccgctattagtcaggacttatatgcaatgggcacaacaggaataacatcagaaaatgccctttttcaaatgaagtcaatgaataatggaatatcatcagttaataataacaacagcaacacccctacgattattaccacgtcacaggaagaaactaatgctggaaatgtacatggcgataccggtggcaattctttgcaaaattctgaagatgacaacttttcttccagttctaccaccaaatgcttactctcttccacttcttcgctatcaataaatcaacgagaagcagcagcagctgcttatggtccagataccgatattcctaggggtaaactagaagttacaataatagaagcacgtgacctagtcactagatcaaaggattcacagccttatgttgtttgtacttttgagagttcagagttcatttctaatggtcctgagtcactaggcgccattaataataacaacaataacaacaacaataatcagcataatcaaaaccagcatattaacaacaacaacgaaaataccaaccctgacgctgctagccagcatcataataataacagtggttggaacggttctcagttaccatcgataaaagagcacttgaagaaaaaacccctttatacacacagatcatcttcccaattagatcagctaaactcttgctcttcagtaaccgatccgagcaaacgttcttctaattcttcgtcgggttcttcaaatggtccaaagaatgatagttcacatccaatatggcatcacaagacaacgtttgatgttttgggatctcactcggaattagatatttctgtttatgatgctgcccacgaccatatgttcttaggccaagttagactgtatccaatgattcataatttagcacatgcttcccaacaccaatggcacagtttgaaacctcgcgttattgatgaagttgtgtccggtgatattttaatcaaatggacttacaaacagacaaagaaaagacattatggcccacaagattttgaagttcttcgattattgggtaagggtacttttggccaagtctaccaagttaagaagaaagacactcaaagaatttatgcaatgaaagttctctccaagaaagttattgtcaagaaaaatgagatcgcccacacaattggcgaaagaaatatcctagtcacgacagcgtccaaatcgtccccattcattgtcggattgaagttttcctttcaaacaccaacagatctgtatttggtcactgattatatgagtggtggagaattattctggcatttacaaaaggagggccgtttttcggaagacagagcgaaattctatatcgctgagttagtcctagcgttagaacatttacacgataacgatatcgtttacagggacctaaagcctgaaaacattctactcgatgccaacggtaacatcgctctttgcgattttggtctttctaaagctgacttgaaggatagaacaaacacattttgcggcaccacggaatacctggcaccagaattgttactggacgaaaccggctacaccaaaatggtcgatttctggtctctaggtgttttgatatttgaaatgtgttgtggttggtcccctttctttgcggaaaataatcaaaaaatgtaccaaaaaattgcctttggtaaagtcaaattccccagagacgtactgtcacaagaggggaggtcttttgtaaagggtttactaaacagaaaccccaaacatagactcggtgccattgatgatggaagagaactacgagctcatccatttttcgcagatatcgactgggaggccttgaagcagaaaaaaattccaccacctttcaaacctcacctagtctcggagacggatacctcgaattttgacccagagttcacaacagcttcaacttcatacatgaacaagcaccagccgatgatgactgctaccccgctatctccagccatgcaagcaaagtttgctggtttcacctttgttgatgagtccgccatcgatgaacacgttaataacaacagaaaattcctacaaaactcgtactttatggaacctggttcctttatcccgggaaatccaaacttacctccagacgaagatgtcatcgatgatgacggggacgaggacatcaatgatggattcaaccaagagaaaaatatgaacaacagccattcgcagatggacttcgacggcgaccaacacatggatgacgaatttgtcagtggaagattcgaaatatga

SEQ ID NO: 312 - protein, 824 aa, Saccharomyces cerevisiae
MMNFFTSKSSNQDTGFSSQHQHPNGQNNGNNNSSTAGNDNGYPCKLVSSGPCASSNNGALFTNFTLQTATPTTAISQDLYAMGTTGITSENALFQMKSMNNGISSVNNNNSNTPTIITTSQEETNAGNVHGDTGGNSLQNSEDDNFSSSSTTKCLLSSTSSLSINQREAAAAAYGPDTDIPRGKLEVTIIEARDLVTRSKDSQPYVVCTFESSEFISNGPESLGAINNNNNNNNNNQHNQNQHINNNNENTNPDAASQHHNNNSGWNGSQLPSIKEHLKKKPLYTHRSSSQLDQLNSCSSVTDPSKRSSNSSSGSSNGPKNDSSHPIWHHKTTFDVLGSHSELDISVYDAAHDHMFLGQVRLYPMIHNLAHASQHQWHSLKPRVIDEVVSGDILIKWTYKQTKKRHYGPQDFEVLRLLGKGTFGQVYQVKKKDTQRIYAMKVLSKKVIVKKNEIAHTIGERNILVTTASKSSPFIVGLKFSFQTPTDLYLVTDYMSGGELFWHLQKEGRFSEDRAKFYIAELVLALEHLHDNDIVYRDLKPENILLDANGNIALCDFGLSKADLKDRTNTFCGTTEYLAPELLLDETGYTKMVDFWSLGVLIFEMCCGWSPFFAENNQKMYQKIAFGKVKFPRDVLSQEGRSFVKGLLNRNPKHRLGAIDDGRELRAHPFFADIDWEALKQKKIPPPFKPHLVSETDTSNFDPEFTTASTSYMNKHQPMMTATPLSPAMQAKFAGFTFVDESAIDEHVNNNRKFLQNSYFMEPGSFIPGNPNLPPDEDVIDDDGDEDINDGFNQEKNMNNSHSQMDFDGDQHMDDEFVSGRFEI

SEQ ID NO: 313 - DNA, 2037 bp, Aspergillus nidulans
atgtctaccgaggataatcacgattcgcaaattttgacggcaagacatcgctcggacgccagcgagcagtcgttcaaatccctgttcggcggcccatcgagtgaagacggaaaagagacggagcccgatacccacgatcataaccatagcttcagcaacgcaaaggcgcccgcaaagtttgcaaaccagaatgtcgcacccttcctcgccagacacatccctgaacaatatgcacccttaggtgctcagtcgattctaccagcagatctcagcagcgcaaactccaaatactgttatcgccatcgcccagatcagaaatgtagacggcaagccgacgagccatctatggataagctacagcgggaactggaatcgcttcctcaaggtgatcagcagagcatatcacatgtctggtccttgttctctgctgcgcctgccaaacatcggaaactcattctgcagggaatcatggctcaatgctgtttcccgcaactctcttacatctccgccaccgtccgtgacctcatccgaatcgatttcatcaccgcgctccctcccgagattgctttcaaaatcctttgctatctggatacaacctctctgtgcaaggcttcccaggtctcgcgcggatggcgtgcgctagccgatgatgatgtagtttggcacagaatgtgtgaacaacatattcatcgcaagtgcaaaaagtgtggttggggcttaccgcttctggatcgcaaacgattgcgtgagtcgaagcgtgagattgaacttcgtgctacaacgtgggacaagggagtggtgggcccacgatcccctgatgcttcggcagagtcacctccttcgggcaaacgaaagcttgaggatgacgaggttgctgttgttaagcggcactgttcatcgctcgggtcagacgcaggagtcgacaaagatagtgatttcttcaagacccgctaccggccatggaaggaagtgtacaaagatcgcttcaaggtcggcacgaactggaaatacgggcgatgctcgatcaaaacatttaagggacatactaatggagtcatgtgtctgcaattcgaggataacattcttgccactggctcctacgacactacaatcaaaatctgggacactgaaaccggggaggagctgcgcacactccgtggacacgagtctggcatccgttgcttacagtttgacgacaccaagttgatcagcggcagcatggaccgcactatcaaggtctggaactggcgcactggggagtgcatttccacatatactggtcaccgcgggggagtcattgggcttcactttgatgcttcgattctcgcctctggctcggttgacaagacggtcaagatctggaacttcgaggataagtcgactttctccctgcgtggacacacagattgggtcaatgcagtcagagtcgacacttcctctcgaactgtcttctcagcatctgatgactgtactgttcgcctttgggacttggacacgaaaacctgcattcggactttccatggacacgtgggtcaagtgcagcaggttgttcctctgccccgcgaatttgagttcgaagaacatgatgccgagtgcgagaacgacgatctcagtaccacctccggcgacgcgaacccgccgtcaatccaggcttcgatgggtttggaacccaacgcagcgtacagccaatcctcggcctttgggacttcgttcgataacggccgtgccgcgccgccacgatacatggttacaagtgcgctggattctacgatccgcctctgggaaaccaccaccggccgctgcttgcgtacgttcttcggccacttggagggagtatgggcgctgggagccgacactctccgcatcgtctctggcgctgaagaccgtatgatcaagatctgggaccccagaactggtaaatgcgagcgtactttcaccggccactctggccctgtcacttgcattggccttggtgacagtcgattcgctactggcagcgaggactgcgaagtacggatgtacagctttcagagttaa

SEQ ID NO: 314 - protein, 678 aa, Aspergillus nidulans
MSTEDNHDSQILTARHRSDASEQSFKSLFGGPSSEDGKETEPDTHDHNHSFSNAKAPAKFANQNVAPFLARHIPEQYAPLGAQSILPADLSSANSKYCYRHRPDQKCRRQADEPSMDKLQRELESLPQGDQQSISHVWSLFSAAPAKHRKLILQGIMAQCCFPQLSYISATVRDLIRIDFITALPPEIAFKILCYLDTTSLCKASQVSRGWRALADDDVVWHRMCEQHIHRKCKKCGWGLPLLDRKRLRESKREIELRATTWDKGVVGPRSPDASAESPPSGKRKLEDDEVAVVKRHCSSLGSDAGVDKDSDFFKTRYRPWKEVYKDRFKVGTNWKYGRCSIKTFKGHTNGVMCLQFEDNILATGSYDTTIKIWDTETGEELRTLRGHESGIRCLQFDDTKLISGSMDRTIKVWNWRTGECISTYTGHRGGVIGLHFDASILASGSVDKTVKIWNFEDKSTFSLRGHTDWVNAVRVDTSSRTVFSASDDCTVRLWDLDTKTCIRTFHGHVGQVQQVVPLPREFEFEEHDAECENDDLSTTSGDANPPSIQASMGLEPNAAYSQSSAFGTSFDNGRAAPPRYMVTSALDSTIRLWETTTGRCLRTFFGHLEGVWALGADTLRIVSGAEDRMIKIWDPRTGKCERTFTGHSGPVTCIGLGDSRFATGSEDCEVRMYSFQS

SEQ ID NO: 315 - DNA, 2301 bp, Saccharomyces cerevisiae
atgagtgaagaggaaacggtctcagccccagctccagcttctacaccggccccggctggaaccgatgtaggtagtggtggagcagcagctggaatagctaatgctggtgctgaaggcggcgacggtgccgaggatgttaagaaacatgggtcgaagatgctagtggggcccaggccgccacaaaatgcgatattcatccataagctataccagattctggaggacgaatcgctacacgacttgatatggtggaccccttcgggcttatccttcatgattaagcctgtggaacggtttagtaaggctttggctacatatttcaagcatactaatatcacgagctttgtaagacagttgaacatttacggctttcacaaggtgtcgcatgatcatagcagcaacgacgctaatagtggcgacgacgccaatactaatgatgacagcaatactcacgatgataatagtggcaacaaaaacagtagtggcgacgaaaataccggtggcggtgtccaagaaaaggagaaaagtaaccccactaaaatctgggaatttaagcatagttctggtattttcaagaaaggtgacattgagggactcaaacacattaagagaagagcttcttcccgtaataactcctcaattaacagtcgaaagaattctagtaatcaaaactacgatatagattccggtgcaagagtaagaccctcttcgattcaagacccgtccaccagttccaattcctttggtaatttcgttccgcaaattccgggcgccaataactctatccccgagtactttaataactctcatgtaacttacgaaaacgcaaaccatgccccgctggaatccaataacccggaaatgcaagagcaaaacagacctccgaactttcaagatgaaacactgaaacatttgaaagaaataaattttgatatggttaagattatagagtctatgcagcatttcatatctttgcaacacagtttttgttcacagagtttcaccttcaagaatgtgagcaagaaaaaatcggaaaatatcgtgaaggatcaccaaaagcaacttcaggcattcgaaagcgatatgttaactttcaaacagcacgtcatgtcgagggcccaccgtacaatagattctctttgtgctgtaaatgctgccgctaccgctgcctctgtcgcccctgcacccgcgcccacatccacatctgcatatgcacccaaatctcagtatgagatgatggttcctccagggaaccagtatgtcccgcagaaatcttcctcgaccacgaacatcccttcgagattcaacacggcttcagtgccgccctcgcaacttttgtacaataccaaccgcagtcgcaaccaacatgtgacttatgcgagcgaaccggcacatgtaccaaactttatcaatcagccgatacccatccaacaactacctccacaatatgcagacacttttagcactccacaaatgatgcacaatccttttgcctcgaaaaataacaacaaaccgggcaacacgaagaggaccaatagtgttctcatggacccgctgactcccgcagcgagtgttggagttcagggtccactaaactatcctatcatgaatattaatccttctgtccgtgactacaacaagcctgtccctcaaaatatggctccgagtccaatatatcctattaatgaaccaacaacgagattgtattctcaaccaaaaatgagaagtctcgggtctacaagctctttgcccaacgatagaagaaacagtcctctgaagctgacaccgagatcatcgttgaatgaagatagtctgtatcccaaacctagaaactctctcaaatccagtatttcgggcacgtctttatcctcctcttttacactagttgccaacaatccagccccaattcggtactctcagcagggattgcttcgctcattaaacaaagctgctaattgtgctccagattcggtaactccattagactcgtctgtcttgacgggccctcctccaaaaaacatggacaatcttcctgctgtttcttcaaatttaataaactcccccatgaacgtcgagcacagctcaagcctatcacaagcagaacctgcaccacaaatagaactaccgcagccatctttgcccacaacgagcaccactaagaatactggcgaggctgacaatagtaagagaaaagggagcggtgtttattctttactgaatcaagaggatagcagcacgtccagtgctgatcctaaaactgaagataaggccgctccggcactcaaaaaggttaagatgtga

SEQ ID NO: 316 - protein, 766 aa, Saccharomyces cerevisiae
MSEEETVSAPAPASTPAPAGTDVGSGGAAAGIANAGAEGGDGAEDVKKHGSKMLVGPRPPQNAIFIHKLYQILEDESLHDLIWWTPSGLSFMIKPVERFSKALATYFKHTNITSFVRQLNIYGFHKVSHDHSSNDANSGDDANTNDDSNTHDDNSGNKNSSGDENTGGGVQEKEKSNPTKIWEFKHSSGIFKKGDIEGLKHIKRRASSRNNSSINSRKNSSNQNYDIDSGARVRPSSIQDPSTSSNSFGNFVPQIPGANNSIPEYFNNSHVTYENANHAPLESNNPEMQEQNRPPNFQDETLKHLKEINFDMVKIIESMQHFISLQHSFCSQSFTFKNVSKKKSENIVKDHQKQLQAFESDMLTFKQHVMSRAHRTIDSLCAVNAAATAASVAPAPAPTSTSAYAPKSQYEMMVPPGNQYVPQKSSSTTNIPSRFNTASVPPSQLLYNTNRSRNQHVTYASEPAHVPNFINQPIPIQQLPPQYADTFSTPQMMHNPFASKNNNKPGNTKRTNSVLMDPLTPAASVGVQGPLNYPIMNINPSVRDYNKPVPQNMAPSPIYPINEPTTRLYSQPKMRSLGSTSSLPNDRRNSPLKLTPRSSLNEDSLYPKPRNSLKSSISGTSLSSSFTLVANNPAPIRYSQQGLLRSLNKAANCAPDSVTPLDSSVLTGPPPKNMDNLPAVSSNLINSPMNVEHSSSLSQAEPAPQIELPQPSLPTTSTTKNTGEADNSKRKGSGVYSLLNQEDSSTSSADPKTEDKAAPALKKVKM

SEQ ID NO: 317 - DNA, 1104 bp, Saccharomyces cerevisiae
atgtcaatatcatcaaagataagaccaactcctcgtaaaccttcacgtatggctaccgaccattcttttaaaatgaaaaaattttatgccgatcctttcgctatatcatcaatttctttggcaattgtatcgtgggtcatcgccatcgggggctccatctcatctgcatccaccaatgaatccttcccacgttttacttggtggggtatagtataccaatttctaattatttgttctttaatgctgttctattgttttgatttagtcgatcattacagaatcttcatcaccacatctattgcagtggcatttgtgtataatacaaacagtgcaacgaatttagtgtatgcggatggtcccaagaaagctgctgcttcagcaggtgtcatcttactttccatcataaatttaatctggattctgtactacggcggtgataatgcttccccaaccaatagatggattgattcgttttccattaagggtatcaggccttcgccattagagaattctcttcatagagctcgtcgaagaggcaataggaacacaacgccttaccaaaataatgtctataatgatgctatacgagactcaggctacgcgacacagtttgatggatatccacagcagcaaccttctcacacaaattatgtatcttctacggcattggctggttttgagaatactcagccaaatacttcagaagccgttaatcttcacttgaacactctacaacaacgtatcaatagcgcaagcaacgcgaaggaaaccaatgataatagcaataatcaaaccaatactaatataggtaatacgttcgatactgatttttcaaatggcaatacggaaactacgatgggagacactttgggtctgtatagcgatatcggtgatgataatttcatttacaaggcaaaagcactgtacccatacgacgctgatgacgatgatgcttacgaaatctcatttgaacaaaatgaaatcctacaagtctctgacattgaaggcagatggtggaaggcaagaagggcaaacggtgaaacaggtattattccaagcaattatgttcaactaatcgatggtccagaagaaatgcatcgttaa

SEQ ID NO: 318 - protein, 367 aa, Saccharomyces cerevisiae
MSISSKIRPTPRKPSRMATDHSFKMKKFYADPFAISSISLAIVSWVIAIGGSISSASTNESFPRFTWWGIVYQFLIICSLMLFYCFDLVDHYRIFITTSIAVAFVYNTNSATNLVYADGPKKAAASAGVILLSIINLIWILYYGGDNASPTNRWIDSFSIKGIRPSPLENSLHRARRRGNRNTTPYQNNVYNDAIRDSGYATQFDGYPQQQPSHTNYVSSTALAGFENTQPNTSEAVNLHLNTLQQRINSASNAKETNDNSNNQTNTNIGNTFDTDFSNGNTETTMGDTLGLYSDIGDDNFIYKAKALYPYDADDDDAYEISFEQNEILQVSDIEGRWWKARRANGETGIIPSNYVQLIDGPEEMHR

SEQ ID NO: 319 - DNA, 633 bp, Saccharomyces cerevisiae
atgttctcatattcagatttctgttctatcggtacggccatgatcttatcggccacaacgttcctaatgggtgttttcttcagtaacatgccatacgattatcatcttttatttaatcctaactctactcaagagcatttcgatttggcactgagacattaccaaattttacatgagactccattgccggtgattgttactttgtgcgttgttgccggtattggcttagttggtggtacaattaaggttttcaagccaaaccctgaactgcagatgtttgagtattgttcattggggttgtacgtgttggctatctgtgtgtttctcactaatgtgaaaacaggtatcgactgttctgtgagccataattggggagaagttacggaaaatcagggtttggcagttattgcttcctccaacataattttattagttatgtttgccggtgttatcatcctacaaattggtttgtggtacagtaactgggatttgcaaaaaagattaaaggagttttatgctcaagaagaaagagaagctgccaatgccggtaaaaagactgagaaagttgacaatgcgaaaaagaatgataacaaatctaaaggtgctcaaaagaggaagaacgccaaaaaatag

SEQ ID NO: 320 - protein, 210 aa, Saccharomyces cerevisiae
MFSYSDFCSIGTAMILSATTFLMGVFFSNMPYDYHLLFNPNSTQEHFDLALRHYQILHETPLPVIVTLCVVAGIGLVGGTIKVFKPNPELQMFEYCSLGLYVLAICVFLTNVKTGIDCSVSHNWGEVTENQGLAVIASSNIILLVMFAGVIILQIGLWYSNWDLQKRLKEFYAQEEREAANAGKKTEKVDNAKKNDNKSKGAQKRKNAKK

SEQ ID NO: 321 - DNA, 4611 bp, Saccharomyces cerevisiae
atgtcacaggtttggcataattcgaattcgcaatcaaacgatgtggctacttcaaatgacgctacgggttccaacgaaagaaacgaaaaagaaccgtccctccagggaaataagcccggttttgttcaacagcagcaacggattactttaccctcgctatctgccttgagtactaaggaggaagatagaagagattccaatggccaacaggctctaacttctcatgctgctcacatattaggttatcctcccccacattcaaatgctatgccctcaattgcaactgattcagcattgaaacagccccacgagtatcaccctcgccctaaatcttcgtcctcttctccctctataaacgcttcgcttatgaatgctggtccagctcccctccccacagtgggagccgccagtttttctttgtcgagatttgacaatccattaccgataaaagctcctgttcatacagaggaaccaaaaagttataatggtcttcaggaagaagaaaaggcgacgcaacggcctcaagattgcaaggaagttcccgctggtgtgcagcctgctgatgcccctgaccctagcagcaaccatgcagatgctaacgatgacaataataacaacgaaaattctcacgatgaagatgctgactacagacctctaaacgtgaaggatgccctatcttacctcgaacaggtcaaatttcaatttagttcgcgtccggatatctataatttatttttagatattatgaaggactttaaatctcaggcaatagacacaccgggcgttattgaaagagtatccactttgttcagaggttatccaattttgattcaagggttcaatacttttctaccccaaggctatagaatcgaatgctcctctaatccggacgaccccattagagttactacaccaatgggtactacgacagtaaacaataacatcagtccatctggtagaggtacaacggatgcacaggaacttggttcttttccagaaagcgatggaaatggtgttcaacagccctccaatgtgccaatggtgccttcgagtgtgtatcaatcggaacaaaaccaagaccaacaacaatctttgcctcttttagctacttcttctggtttaccttcaattcaacaacctgaaatgcctgcacatcgccaaatcccacaaagtcaatctttagtgcctcaagaagatgctaagaaaaacgttgatgtcgaatttagtcaagccataagctacgttaataaaattaaaactagatttgccgaccaacctgatatttacaagcattttctggaaatactacaaacttatcagcgagagcaaaagccaataaacgaagtctacgcacaagtgacgcatcttttccaaaatgctcctgatttactagaagatttcaagaaattcttgccggactcttcagcttctgccaatcagcaggtgcaacatgctcagcaacatgctcaacaacaacatgaggcccaaatgcatgcacaggcacaagctcaggctcaggcacaggcacaggtggaacaacagaagcagcaacagcaattcttgtatccagcttcgggctattacggccatccttctaaccgaggtattccacagcaaaacttgcctcctataggaagcttctcgcctccaacaaacggttcgaccgtacatgaagcctatcaggatcaacagcacatgcaaccaccccacttcatgcccttaccatcgatcgttcaacacgggccaaatatggtacatcaagggatagcgaatgaaaatccacctctatcagatctaagaacgtctctcactgaacagtacgctccttctagtatacaacatcagcagcagcacccgcaaagtattagtcctatagcaaatacgcagtatggtgatatccctgttagaccggaaattgatttagatcctagcattgtgcctgtggtccctgaacccactgagcccatcgaaaacaatatatcgcttaatgaggaagtcactttcttcgaaaaggccaagaggtatatcggcaataaacatttatacactgagtttttgaaaattttaaatttgtactctcaagatatacttgatcttgacgatttagtggaaaaggtagatttctacttgggttccaataaagaactatttacgtggttcaaaaactttgttggctaccaagaaaaaaccaaatgtatcgagaatattgttcatgaaaaacatagattggatttagatttatgtgaggcatttggcccaagttacaagaggctaccaaaaagtgacactttcatgccatgctcaggtagggatgatatgtgttgggaagtcttgaacgatgaatgggttggacatcctgtatgggcttccgaagattcgggatttattgctcatcgtaaaaaccagtatgaggaaacactattcaagatcgaagaggaaagacatgagtatgatttttacattgaatcaaatttaagaactattcaatgtttggaaacaattgtaaataagatcgagaacatgactgagaatgaaaaagccaattttaaactgcctccaggtcttggccatacttcaatgactatttataaaaaagtgataaggaaagtttatgataaggaaagggggttcgagattattgatgctttgcatgagcaccctgcagtgacagccccagtcgttctgaaaaggttaaagcaaaaagacgaagaatggagaagagctcaacgtgaatggaataaagtttggagggagttagaacagaaggtttttttcaagtcattagatcatttaggcttaacatttaaacaggctgacaagaaattattaactacaaagcagttgatatcagagattagcagcatcaaagttgatcaaacaaacaaaaaaattcactggttaactcctaaaccaaagagccagttagattttgatttccctgataaaaacattttctatgatatcttgtgtttggctgacacttttataacccataccacagcctattctaatcccgataaagaaagattgaaagatttactaaaatacttcatctctttgtttttttctatttctttcgaaaaaatcgaagaatcgttgtactcccataagcaaaacgtgtcagaatctagcggatctgacgatggcagttctattgcatcaaggaagaggccctatcaacaagaaatgagtttacttgatattttacacaggagcagatatcaaaagctaaagcgttctaatgatgaagatggcaaagttccccagctctctgaaccacccgaagaagaacctaataccattgaggaggaagagctcatcgatgaagaagctaaaaatccgtggctaactgggaatttagtggaggaagcaaactctcagggtattatccaaaatcgcagtatttttaatctattcgctaatacgaatatttacatatttttccgtcattggacaacgatttatgagcggcttttggaaattaagcaaatgaatgaaagggtcacaaaggaaatcaacacaaggtcgacagttacttttgccaaagatctagatttattatcgagtcaactttccgaaatgggactagattttgttggtgaagacgcgtacaaacaggttttaagactgagtagaaggttgattaatggggatcttgaacatcagtggtttgaagagagtttgcggcaagcttacaataacaaagcgtttaaactctatacaattgataaagtcacccaatcgttggtaaagcatgctcataccttgatgactgacgctaaaactgcggaaataatggctttgttcgttaaagatagaaatgcctccaccacgagtgcgaaggaccaaattatctatcgcttgcaggtgcgctcacatatgtccaacacagaaaatatgtttagaatagagtttgataaaagaactctgcatgtttccattcaatatattgcacttgatgatttgacactaaaggaaccaaaggcagacgaagataaatggaaatattatgtaacatcgtatgctctgccacatccaacagaaggcattccgcacgagaaactgaagataccatttttggaaaggctcatcgaatttggacaagatattgatggaacagaggtagatgaggagttttcccccgaaggcatctctgtatcgacattgaaaattaagatccagcctataacctaccaactgcatattgaaaacgggtcttacgatgtttttacccgtaaggctactaacaaatatcctactattgctaatgataatactcaaaaaggaatggtttctcagaagaaggagttgatatcaaaatttctagactgtgcagttggtttgagaaataatttagatgaggctcaaaaattaagtatgcaaaaaaaatgggagaacctaaaagacagcatagcaaagacgagtgctggaaaccagggaatagagagtgaaaccgaaaaaggtaaaattacgaaacaggagcagtcggataatttggacagctctactgcaagtgtactgcctgcatccattactactgtaccacaagatgataatatagaaacgactgggaatactgaatcttcagacaagggggctaagattcaataa

SEQ ID NO: 322 - protein, 1536 aa, Saccharomyces cerevisiae
MSQVWHNSNSQSNDVATSNDATGSNERNEKEPSLQGNKPGFVQQQQRITLPSLSALSTKEEDRRDSNGQQALTSHAAHILGYPPPHSNAMPSIATDSALKQPHEYHPRPKSSSSSPSINASLMNAGPAPLPTVGAASFSLSRFDNPLPIKAPVHTEEPKSYNGLQEEEKATQRPQDCKEVPAGVQPADAPDPSSNHADANDDNNNNENSHDEDADYRPLNVKDALSYLEQVKFQFSSRPDIYNLFLDIMKDFKSQAIDTPGVIERVSTLFRGYPILIQGFNTFLPQGYRIECSSNPDDPIRVTTPMGTTTVNNNISPSGRGTTDAQELGSFPESDGNGVQQPSNVPMVPSSVYQSEQNQDQQQSLPLLATSSGLPSIQQPEMPAHRQIPQSQSLVPQEDAKKNVDVEFSQAISYVNKIKTRFADQPDIYKHFLEILQTYQREQKPINEVYAQVTHLFQNAPDLLEDFKKFLPDSSASANQQVQHAQQHAQQQHEAQMHAQAQAQAQAQAQVEQQKQQQQFLYPASGYYGHPSNRGIPQQNLPPIGSFSPPTNGSTVHEAYQDQQHMQPPHFMPLPSIVQHGPNMVHQGIANENPPLSDLRTSLTEQYAPSSIQHQQQHPQSISPIANTQYGDIPVRPEIDLDPSIVPVVPEPTEPIENNISLNEEVTFFEKAKRYIGNKHLYTEFLKILNLYSQDILDLDDLVEKVDFYLGSNKELFTWFKNFVGYQEKTKCIENIVHEKHRLDLDLCEAFGPSYKRLPKSDTFMPCSGRDDMCWEVLNDEWVGHPVWASEDSGFIAHRKNQYEETLFKIEEERHEYDFYIESNLRTIQCLETIVNKIENMTENEKANFKLPPGLGHTSMTIYKKVIRKVYDKERGFEIIDALHEHPAVTAPVVLKRLKQKDEEWRRAQREWNKVWRELEQKVFFKSLDHLGLTFKQADKKLLTTKQLISEISSIKVDQTNKKIHWLTPKPKSQLDFDFPDKNIFYDILCLADTFITHTTAYSNPDKERLKDLLKYFISLFFSISFEKIEESLYSHKQNVSESSGSDDGSSIASRKRPYQQEMSLLDILHRSRYQKLKRSNDEDGKVPQLSEPPEEEPNTIEEEELIDEEAKNPWLTGNLVEEANSQGIIQNRSIFNLFANTNIYIFFRHWTTIYERLLEIKQMNERVTKEINTRSTVTFAKDLDLLSSQLSEMGLDFVGEDAYKQVLRLSRRLINGDLEHQWFEESLRQAYNNKAFKLYTIDKVTQSLVKHAHTLMTDAKTAEIMALFVKDRNASTTSAKDQIIYRLQVRSHMSNTENMFRIEFDKRTLHVSIQYIALDDLTLKEPKADEDKWKYYVTSYALPHPTEGIPHEKLKIPFLERLIEFGQDIDGTEVDEEFSPEGISVSTLKIKIQPITYQLHIENGSYDVFTRKATNKYPTIANDNTQKGMVSQKKELISKFLDCAVGLRNNLDEAQKLSMQKKWENLKDSIAKTSAGNQGIESETEKGKITKQEQSDNLDSSTASVLPASITTVPQDDNIETTGNTESSDKGAKIQ

SEQ ID NO: 323 - DNA, 2490 bp, Saccharomyces cerevisiae
atggccaagaggaaatatggcaggtcttattccctcgatgatacagattcctgcagcaataaagtcctgatagtaccaaccggtcaaagctcctctaacgcaatcactgatttctctgtcagaaaggcgcatgcttgcgatagatgcagactgaaaaaaatcaagtgtgacggtttaaaaccgaactgttcaaactgtgcgaaaattgacttcccttgcaaaacctcggataaactgtcgaggagaggtcttccaaaggggtatacagaactactagaaaaagaggtcgtccgtttgacaaatatgaatgcgagttccagcgccaatgcaaattctaatttgccgttcattaatgatacattttattgttttgataattacaacactcagtctgaaaatcaaaggtttttgggacatttgacatggaatattctaactaatacttttcctactcaaaaagcagtagtttttacagacgatcgaaataatattgatctacaactgcaactgttaacaaattttttgaacctgaatggtgactttaatcatctcccaaattttcttttacttaaatatgattataaccttcagtttttgaaaaatttgttgtctgtcattattaaagatttttttaaaaggcaaaattctttgctacttctattataccctacaaatttatggaaaaatttgctattagacaagattaattcaaccgcaatgacaggtgaacccataactctactggcgttactttatattattcaatttacttggtcttgttttgatgatttcaagctttttaaagtcacgaagcttattgtttctctgacaacaaacagcaaattagacttgaaagttttgcaattggttaacttatccatcttttattttatgggcgcctctgttgactcttgtaaaagtaaaagctcgttaacagaacattcaaatgtaaattcagtaatatggaccaatgatttgctaaacctaaactttacaaatattttgaatatgggattgtacataaatcccaaaaatttaattcctatatcaggcaacaataataataataaatctaatgaagaggatgatagaatagtgacattttggtgctttcaattcttaagctcatggtggtccttaattcaaggtttaccaaagtccaactttttaactgaagaatttcaaccgaaatcaatctcggttctagaaatccccaggctgaagccctttgaaattttgttaaacttcatcatatattctttggatggatgtaatttgttgaatatctcatctttaaatgtttcggacccaaatttccaatttttccagaatgaactggaaagctttaaaaaaaatttattactgtggaacctttatcacaatttgagtgatcacgataacttccgattcttaacatccagttcaaataaaaaactaacaacaaatttactacttaagaatttgacgggtctaaatcacaaactcaatcaacctgattttgtggagattcaattaactttattttacttgagtttaaaattaatgactttaaaggaaggggaccaagatttgaagaaagaggatatctcgttagagatattgtccctatattttttaattcttacagatgactctaataatgatgataatcaacagttacaaccacagcaactaaatctctaccattttacgcccttcaatagtattgacattattgacttatgtttaaacaatttaaacaattggtcattatcacttaaatacgaaagtggtcaaaaccagccccactcaagtaaaataaagtttgaaaaatttcaaaactttttaaatcactggtgtccaatatggtactatgatgaattttccacaaacccttttttacaaatcctcaaaatcaatttcaaattacttccttttgagacaatccattactcacaagaagagcaacgattgttaataagtttgaataaattgagatatttggatgccgtatcgagctttaattcaagttcagtcaagtcgaatttcgcgtctaaggtcaatacccagctaaaccttttgcaacactcgagttctaactccaatttcctagatgcgtcaccatacgattttaataaaatttttatgaacaactttgaaaactatgactacgaaacagatgaaggatatgcggaagatgatgatgaagaggatagtgacagtgacaatagcttaccactagaaattccttttaaaaaaagtaaaaataaatgcaagaataggaataaagagctttcacaaaggttatccctatttgaaaacagagatagcaattcggtagatttcaacacagatacaaatttaaatttaaaccctgattcgccatcagttacgtcttctaagaaaaaatatttagatcatattattttagataaccgagacatcgttagcaaccatgactccagtaaacaaaaattcaagatccagaatattttgaactcgaccttctaa

SEQ ID NO: 324 - protein, 829 aa, Saccharomyces cerevisiae
MAKRKYGRSYSLDDTDSCSNKVLIVPTGQSSSNAITDFSVRKAHACDRCRLKKIKCDGLKPNCSNCAKIDFPCKTSDKLSRRGLPKGYTELLEKEVVRLTNMNASSSANANSNLPFINDTFYCFDNYNTQSENQRFLGHLTWNILTNTFPTQKAVVFTDDRNNIDLQLQLLTNFLNLNGDFNHLPNFLLLKYDYNLQFLKNLLSVIIKDFFKRQNSLLLLLYPTNLWKNLLLDKINSTAMTGEPITLLALLYIIQFTWSCFDDFKLFKVTKLIVSLTTNSKLDLKVLQLVNLSIFYFMGASVDSCKSKSSLTEHSNVNSVIWTNDLLNLNFTNILNMGLYINPKNLIPISGNNNNNKSNEEDDRIVTFWCFQFLSSWWSLIQGLPKSNFLTEEFQPKSISVLEIPRLKPFEILLNFIIYSLDGCNLLNISSLNVSDPNFQFFQNELESFKKNLLLWNLYHNLSDHDNFRFLTSSSNKKLTTNLLLKNLTGLNHKLNQPDFVEIQLTLFYLSLKLMTLKEGDQDLKKEDISLEILSLYFLILTDDSNNDDNQQLQPQQLNLYHFTPFNSIDIIDLCLNNLNNWSLSLKYESGQNQPHSSKIKFEKFQNFLNHWCPIWYYDEFSTNPFLQILKINFKLLPFETIHYSQEEQRLLISLNKLRYLDAVSSFNSSSVKSNFASKVNTQLNLLQHSSSNSNFLDASPYDFNKIFMNNFENYDYETDEGYAEDDDEEDSDSDNSLPLEIPFKKSKNKCKNRNKELSQRLSLFENRDSNSVDFNTDTNLNLNPDSPSVTSSKKKYLDHIILDNRDIVSNHDSSKQKFKIQNILNSTF

SEQ ID NO: 325 - DNA, 2316 bp, Saccharomyces cerevisiae
atgtctgtgcgaaacctcaccaataatcgtcattccaacagcgaaaatagtgtttccggaagcgaaaactccttttattcctcgaatgagcaatcaagacaaagctcatcattagaacctgcagatggtcagaacgttagggtgagcggtaatcctttccttggaagtgaagaatttgacgaagattataattcacccagtggagacgatgagcggcgtggggcaaatgaatattccagttcttcatccataaattataataacgatcctaacagcgatacttctcttctggctaatgaaaagaactcacccgagagaaatggtcaaagaatgtcagactataagggctattatgctaagactaacctaacttctgctaataacttaaacaatcataataacaataattataagaacattataagcagtagtaacgataatagttttgcatcacatttacagccgccggacagaaacttaccgtctcatccttcttcaaataatatgagtagcttttctaacaacagcttaattaagtctccaccaccttttgacagatatccgctagtaggaacgaggcatatttcagcggctcaatctcagtcgcagaaccttataaatgaaaagaaaagagcgaatatgactggctcatcttcttctgctcacgactcttcattatcatccaccaacttatacatgggcgaacaggatttttcgccctttggcggttatccagcttccttctttccgttaacgttggacgaaaaggaagacgatgactacattcataatccaaatgtcgaggaagaagcaaagttagatagaaggaggttcgttgacgacttcaaacacatggatagaagatctttcttggggcttctgggtattctatttttatttatggctggtatatttattttcattgtattacctgcaattacattttccggggtagtttatcatcatgaacatgttcatgcggcaaattcagcaggatcgtcgtcttctaatactacatccaagtcattgactgaatatcaatatcctcaacttgcggctataaggacaactttagttgatccagacacacctgacagtgcgaagacaagagtagcgaaagatggatctaaatggcagctggtgttttccgatgaatttaatgctgaaggtaggaccttttacgatggcgatgaccagttttggacagctcctgacatccactacgacgctacgaaagatcttgaatggtactcaccagatgccgttacaactacaaatggtaccttgacgttgagaatggatgcattcagaaaccatgacctttattacagatctggtatggtacagagctggaacaaactctgctttacagaaggtgcgttagaagtttccgcgaacctccctaattatggtcgagttacaggattatggcctggtatgtggaccatggggaacttgggcagaccaggttatttggcgagtactcaaggtgtttggccttattcatatgaagcatgtgacgctggtataacaccaaaccaaagttccccagatggtatttcttacttgccgggacaaaagttgagtgtttgtacttgtgataatgaggatcatccaaatcagggagttggaagaggcgcaccggaaatagatattttagaaggtgaagctgatacaattttgggtgttggtgttgcgtcacaatctctacaaattgctccatttgatatatggtacatgcccgattatgacttcatcgaagtttataatttcaccacaacaactatgaatacttacgctggtgggccttttcaacaagctgtctcagcaatatccactttaaatgtaacatggtatgaatttggggaggaagcaggttattttcaaaagtatgccattgaatatctcaatgatgacgacaacggatatattcgttggtttgtgggagagaaccctactttcacactatatgctacttctttacatcctagtggtaatattgactggaggagaataagtaaggagccaatgtcagcgattttaaacttaggtatttccaacaactgggcctatatcgactggcaatatatatttttcccggtgacaatgtcaatagattacgtccgattataccagccgaagggttctacgtccattacttgtgatcctgaggactacccgacatatgattatatccaaagccatctaaatgcatattataacgccaatttaactgattgggaacaggctggatatactttcccaaaaaatattctaacaggaggttgtagtagttcaaaattctcattatcctga

SEQ ID NO: 326 - protein, 771 aa, Saccharomyces cerevisiae
MSVRNLTNNRHSNSENSVSGSENSFYSSNEQSRQSSSLEPADGQNVRVSGNPFLGSEEFDEDYNSPSGDDERRGANEYSSSSSINYNNDPNSDTSLLANEKNSPERNGQRMSDYKGYYAKTNLTSANNLNNHNNNNYKNIISSSNDNSFASHLQPPDRNLPSHPSSNNMSSFSNNSLIKSPPPFDRYPLVGTRHISAAQSQSQNLINEKKRANMTGSSSSAHDSSLSSTNLYMGEQDFSPFGGYPASFFPLTLDEKEDDDYIHNPNVEEEAKLDRRRFVDDFKHMDRRSFLGLLGILFLFMAGIFIFIVLPAITFSGVVYHHEHVHAANSAGSSSSNTTSKSLTEYQYPQLAAIRTTLVDPDTPDSAKTRVAKDGSKWQLVFSDEFNAEGRTFYDGDDQFWTAPDIHYDATKDLEWYSPDAVTTTNGTLTLRMDAFRNHDLYYRSGMVQSWNKLCFTEGALEVSANLPNYGRVTGLWPGMWTMGNLGRPGYLASTQGVWPYSYEACDAGITPNQSSPDGISYLPGQKLSVCTCDNEDHPNQGVGRGAPEIDILEGEADTILGVGVASQSLQIAPFDIWYMPDYDFIEVYNFTTTTMNTYAGGPFQQAVSAISTLNVTWYEFGEEAGYFQKYAIEYLNDDDNGYIRWFVGENPTFTLYATSLHPSGNIDWRRISKEPMSAILNLGISNNWAYIDWQYIFFPVTMSIDYVRLYQPKGSTSITCDPEDYPTYDYIQSHLNAYYNANLTDWEQAGYTFPKNILTGGCSSSKFSLS

SEQ ID NO: 327 - DNA, 1869 bp, Saccharomyces cerevisiae
atgagcttttccaccataaatagcaacgtcaataaaaccaccggcgatagcaataataacaccaccgagaacagttcgactgcagaccttttaggaatggacttgttgcagagcgggcctcgactgatgaacacgatgcagccaaacaactcttctgacatgctgcacattaacaacaagactaataacgttcaacaaccagctggaaacacaaatatcagcagtgctaatgcgggagcaaaggctccagcaaatgagttcgtaagaaaactgttcaggatactggaaaacaatgaatatcctgacattgtaacttggactgagaacggcaaaagtttcgtcgttttggacacaggaaagttcactacgcatatattgcctaatcacttcaaacattcaaattttgcatcttttgtaaggcaactaaacaagtatgactttcacaaggttaagagaagtcccgaggaaagacagagatgtaaatatggcgaacaaagttgggagtttcagcatccagaatttagagtccattacggaaaaggtctcgataacatcaaaaggaaaattccggcgcaaaggaaagtgcttttggatgaatctcaaaaggctcttttgcatttcaatagtgaaggcactaaccccaacaatccttctgggtctcttttgaatgaatccaccacagagctgttgttaagcaataccgtaagtaaagatgcatttggaaatctaagaaggcgagtagacaaactacaaaaggagttggatatgtccaaaatggagagttatgctactaaagtagaactacaaaagttgaactcgaaatacaatacggttatcgaaagtttgataacattcaagaccataaatgaaaatttactcaacaacttcaacactctgtgttccactttggcaaataatggtattgaagtgccaatatttggcgacaatggaaaccgtaacccaactggtaataccaacccagcaacaacaacagctatccaaagcaacaacaacaccaacaatgcttctccggcaacatctacagtttccttacaactacctaatttacccgatcagaatagcctaacaccaaatgctcaaaataacacagtcacgctacgaaaaggtttccatgtactgttggtggaagatgacgcagtgtctatacagttgtgttcaaaatttttacggaaatatggctgtactgtccaagttgtcagcgacggtctttcagctatctcaacactagagaagtataggtatgatttggttttaatggacattgttatgccaaacctagatggtgccacagcgacatccattgtcagaagttttgataatgagactcccatcattgccatgacaggtaacattatgaatcaagacttgatcacatacttacaacatggaatgaatgatatcttggccaaaccattcacgagggatgatttacactcaattttaatacgttatctaaaggaccgtattcctttatgcgaacagcaattaccacctcgcaactcttcgccacaaactcattccaacaccaatactgctaattcgaatcctaatacgattaatgaacagtcgttagccatgttaccacaagataatccgtcaactactacccctgttaccccaggtgcctctatatcttctgcacagcatgttcaacaaggtcaacaagaacagcagcatcaaattttccatgctcagcagcagcagcagcatcacaacgccattgctaatgctaggtcagacgtagccataccgaatttggaacatgaaatcaacactgtaccacattcctcaatgggttccactccgcaattaccacaatctacacttcaagaaaaccagctatcataa

SEQ ID NO: 328 - protein, 622 aa, Saccharomyces cerevisiae
MSFSTINSNVNKTTGDSNNNTTENSSTADLLGMDLLQSGPRLMNTMQPNNSSDMLHINNKTNNVQQPAGNTNISSANAGAKAPANEFVRKLFRILENNEYPDIVTWTENGKSFVVLDTGKFTTHILPNHFKHSNFASFVRQLNKYDFHKVKRSPEERQRCKYGEQSWEFQHPEFRVHYGKGLDNIKRKIPAQRKVLLDESQKALLHFNSEGTNPNNPSGSLLNESTTELLLSNTVSKDAFGNLRRRVDKLQKELDMSKMESYATKVELQKLNSKYNTVIESLITFKTINENLLNNFNTLCSTLANNGIEVPIFGDNGNRNPTGNTNPATTTAIQSNNNTNNASPATSTVSLQLPNLPDQNSLTPNAQNNTVTLRKGFHVLLVEDDAVSIQLCSKFLRKYGCTVQVVSDGLSAISTLEKYRYDLVLMDIVMPNLDGATATSIVRSFDNETPIIAMTGNIMNQDLITYLQHGMNDILAKPFTRDDLHSILIRYLKDRIPLCEQQLPPRNSSPQTHSNTNTANSNPNTINEQSLAMLPQDNPSTTTPVTPGASISSAQHVQQGQQEQQHQIFHAQQQQQHHNAIANARSDVAIPNLEHEINTVPHSSMGSTPQLPQSTLQENQLS

SEQ ID NO: 329 - DNA, 1137 bp, Saccharomyces cerevisiae
atgagaccgaacaaaacaagtctgcttctggcgttattatccattttatcgcaagcgaacgcctatgaatacgtgaattgttttagctcactaccctctgacttttcaaaggccgattcatataactggcagtcgagttcacactgtaacagtgagtgtagcgcaaaaggtgcaagctactttgccctttataatcattcagaatgttattgtggtgatactaatccatctggttcggaatctacttcctcttcatgtaatacgtattgctttggttacagcagtgagatgtgtggtggtgaagatgcctattctgtgtaccaacttgactctgacacaaatagcaatagcataagcagctcagattcaagtacggagtctacttctgcgtcgtcttccacaacttcttcaacaacgtcctccacaacatcaactacatcatcgactacatcatcaactacatcatcaatggcgtcttcctctacagtacagaattcccccgagtcaactcaagcagctgcctctatttcaacgtcacagagttcgagcactgtaacgtcagaaagctcgctaacttcggatactttggcaacgagcagtactagctctcaatcacaggacgccacttcgataatctattccactacttttcacactgagggcggttccacaatttttgtcacgaacaccatcacggcaagtgcacagaattcaggatcggccacaggtacagctggatctgactctacgagtggaagtaaaactcataaaaagaaagccaatgtaggggcaattgtaggcggcgttgtaggtggtgtagtgggagccgtagccattgctctttgtatcttgttgattgtcagacacattaatatgaagcgggaacaagacaggatggaaaaggaataccaagaggcgataaaaccagttgagtaccctgataaactatacgcctcttcattttcatctaatcacgggccctcttcaggtagcttcgaggaggagcacaccaaagggcaaactgatattaaccctttcgacgactcaaggagaataagtaacggaacattcataaatggcggaccaggagggaaaaacaacgttttaacagtggtcaatccagacgaagctgattga

SEQ ID NO: 330 - protein, 378 aa, Saccharomyces cerevisiae
MRPNKTSLLLALLSILSQANAYEYVNCFSSLPSDFSKADSYNWQSSSHCNSECSAKGASYFALYNHSECYCGDTNPSGSESTSSSCNTYCFGYSSEMCGGEDAYSVYQLDSDTNSNSISSSDSSTESTSASSSTTSSTTSSTTSTTSSTTSSTTSSMASSSTVQNSPESTQAAASISTSQSSSTVTSESSLTSDTLATSSTSSQSQDATSIIYSTTFHTEGGSTIFVTNTITASAQNSGSATGTAGSDSTSGSKTHKKKANVGAIVGGVVGGVVGAVAIALCILLIVRHINMKREQDRMEKEYQEAIKPVEYPDKLYASSFSSNHGPSSGSFEEEHTKGQTDINPFDDSRRISNGTFINGGPGGKNNVLTVVNPDEAD

SEQ ID NO: 331 - DNA, 3663 bp, Saccharomyces cerevisiae
atgcgatttggcctgccatcaaaattggaactcactcctccgtttaggataggcatccgaactcaactaacggcactagttagtatagtggctttgggctcactgattattctggctgtaacgacaggggtctattttacctcgaactataaaaatttaaggtccgatagactgtacattgccgctcagttaaagtcatcacagattgaccaaactctaaactacttatattaccaggcgtactatttggcatcaagagacgccctgcaaagctcactaacaagttacgttgcaggtaacaagagtgcagataattgggtagattccttgagtgtgattcaaaaatttttgagctcttcaaacttgttttatgttgctaaagtttacgattcttcatttaatgctgttttgaacgctacgaataatggaactggtgatctaattccagaagatgttttagacagtttgttcccattatccaccgatacaccgctaccttcttcactggaaactataggtatattgacggatccagtactaaatagcaccgactatttgatgtctatgtctttacctatttttgccaatccttctattatcttgactgattcaagggtttacggatacattactataataatgtcggcagagggtctgaaaagtgtgttcaacgatacaactgctttagaacattccacaattgccattatttctgcagtatataatagtcaaggcaaagcttcagggtatcattttgtctttccaccgtatggatcacgatcagacctcccgcaaaaagttttttctataaaaaatgatacattcattagtagcgcatttagaaacgggaagggagggtctttgaaacaaaccaatatcctttctacacggaatactgctttaggctattcaccatgttcgtttaacctagttaattgggtcgcgatagtttcacagcctgagtcggttttcctttctccagcaacgaaactagcaaaaatcatcaccggcactgtcatcgctattggtgtctttgtcattttgttaacccttcctctagcacactgggcagtgcaaccaattgtacgtctacaaaaggcaactgaattaattacagaggggagaggccttcgaccgagcaccccaagaacgataagcagagccagttcattcaaaagaggatttagttctggatttgctgttccttcttcgttattacaatttaatactgctgaagctggcagcaccacaagcgtaagtggccatggaggcagtggccatggcagtggtgcagctttttcagcaaatagtagcatgaaaagcgctataaaccttggaaatgagaaaatgtcacctccagaggaggagaacaaaataccgaataaccacaccgatgctaaaatatcaatggatggctcgctaaatcacgatttgcttggaccacattccttgagacataatgacactgacagaagttccaatagatctcacattctcacaacttctgcaaatttaactgaagctaggctaccagattatagaagactattttctgatgaactttccgatttaacagaaaccttcaatactatgacagacgcattagaccaacattatgctcttctagaagaaagagttagggcgaggacaaaacaactcgaagctgccaagattgaggcagaggccgcaaatgaagcaaaaaccgtctttattgccaatatttcgcacgaattgagaacgcctttaaatggtattctgggtatgacggctatttcaatggaagaaaccgatgttaacaaaataagaaatagtttaaaactcatttttagatcaggtgagcttttgcttcatattctaacggaattgttaactttttccaaaaacgttcttcaaagaacgaaactggagaaaagagatttttgcattaccgatgttgccttacaaataaaatcgatatttggtaaagttgcaaaggatcagcgtgttcgtctttcaatatcattgtttcctaatttgataaggacaatggttctttggggtgattccaacagaattattcaaattgtgatgaatctagtgtccaatgcactaaagttcacccctgtagatggtaccgttgatgtaagaatgaaactgttgggtgaatacgacaaagaattaagcgagaagaagcaatacaaagaagtgtatatcaaaaaagggacagaagtaaccgaaaatttagaaactacagataaatacgatcttccaactttatcgaaccataggaaaagtgtcgatttagaatccagcgctacttccctaggaagtaatagagacacttcgacaattcaggaagagataacaaaaagaaatactgttgcgaatgaaagtatctataagaaagtgaatgacagggaaaaagcttcgaatgatgatgtatcttctatagtatcaacaactaccagctcgtatgataacgctatcttcaatagtcagttcaataaagcacctggctcagatgatgaagaaggtggtaacctaggaagacctatcgaaaaccccaaaacgtgggttatttctattgaagtggaagacactgggcctggtattgacccttccttacaagaatctgtatttcatccatttgttcaaggtgatcaaacattgtccaggcaatatggtggtactggcttaggtctatcaatctgtagacagttagcaaatatgatgcatggaacgatgaaattagagtcgaaagtaggtgttggtagtaaattcacttttaccttgccattaaatcaaactaaagagatcagttttgcagatatggagtttccttttgaggacgaatttaatcctgagagtagaaagaacagaagagtcaagtttagtgttgctaaaagcatcaagagccgacaatccacatcatctgttgcaacaccagctacaaatagaagtagcctaaccaacgacgtgctaccggaggtaagaagtaaaggtaagcatgagacgaaagatgttggaaatcctaacatgggaagagaagaaaaaaacgacaatggagggcttgaacaactgcaggaaaaaaatattaaaccttctatatgtcttacaggtgctgaagttaacgaacaaaattccttgtcttctaagcatcgttctcgacatgaaggtctaggttctgtcaatcttgatagaccatttttgcaaagtactggtacagccacatcaagtagaaacatccccacagtcaaagacgacgataaaaatgaaacaagtgtcaaaattttggttgtagaagataatcatgtaaatcaggaagttatcaaaagaatgttgaacttggagggcattgaaaatattgaactggcttgcgatggccaagaagcattcgacaaagttaaagaattgacatctaagggcgaaaattataatatgattttcatggatgtccagatgcctaaagtggatggtttactttctaccaagatgataaggcgcgatttaggttatacctcacctattgtcgctctaaccgcttttgctgacgatagcaacattaaagaatgtttggaatcaggaatgaacggatttttatcgaaaccaatcaaaagaccaaaattgaaaactattcttactgagttttgtgcagcatatcagggaaagaaaaataacaaatga

SEQ ID NO: 332 - protein, 1220 aa, Saccharomyces cerevisiae
MRFGLPSKLELTPPFRIGIRTQLTALVSIVALGSLIILAVTTGVYFTSNYKNLRSDRLYIAAQLKSSQIDQTLNYLYYQAYYLASRDALQSSLTSYVAGNKSADNWVDSLSVIQKFLSSSNLFYVAKVYDSSFNAVLNATNNGTGDLIPEDVLDSLFPLSTDTPLPSSLETIGILTDPVLNSTDYLMSMSLPIFANPSIILTDSRVYGYITIIMSAEGLKSVFNDTTALEHSTIAIISAVYNSQGKASGYHFVFPPYGSRSDLPQKVFSIKNDTFISSAFRNGKGGSLKQTNILSTRNTALGYSPCSFNLVNWVAIVSQPESVFLSPATKLAKIITGTVIAIGVFVILLTLPLAHWAVQPIVRLQKATELITEGRGLRPSTPRTISRASSFKRGFSSGFAVPSSLLQFNTAEAGSTTSVSGHGGSGHGSGAAFSANSSMKSAINLGNEKMSPPEEENKIPNNHTDAKISMDGSLNHDLLGPHSLRHNDTDRSSNRSHILTTSANLTEARLPDYRRLFSDELSDLTETFNTMTDALDQHYALLEERVRARTKQLEAAKIEAEAANEAKTVFIANISHELRTPLNGILGMTAISMEETDVNKIRNSLKLIFRSGELLLHILTELLTFSKNVLQRTKLEKRDFCITDVALQIKSIFGKVAKDQRVRLSISLFPNLIRTMVLWGDSNRIIQIVMNLVSNALKFTPVDGTVDVRMKLLGEYDKELSEKKQYKEVYIKKGTEVTENLETTDKYDLPTLSNHRKSVDLESSATSLGSNRDTSTIQEEITKRNTVANESIYKKVNDREKASNDDVSSIVSTTTSSYDNAIFNSQFNKAPGSDDEEGGNLGRPIENPKTWVISIEVEDTGPGIDPSLQESVFHPFVQGDQTLSRQYGGTGLGLSICRQLANMMHGTMKLESKVGVGSKFTFTLPLNQTKEISFADMEFPFEDEFNPESRKNRRVKFSVAKSIKSRQSTSSVATPATNRSSLTNDVLPEVRSKGKHETKDVGNPNMGREEKNDNGGLEQLQEKNIKPSICLTGAEVNEQNSLSSKHRSRHEGLGSVNLDRPFLQSTGTATSSRNIPTVKDDDKNETSVKILVVEDNHVNQEVIKRMLNLEGIENIELACDGQEAFDKVKELTSKGENYNMIFMDVQMPKVDGLLSTKMIRRDLGYTSPIVALTAFADDSNIKECLESGMNGFLSKPIKRPKLKTILTEFCAAYQGKKNNK

SEQ ID NO: 333 - DNA, 1455 bp, Saccharomyces cerevisiae
atggctgataagatagagaggcatactttcaaggtcttcaatcaagatttcagtgtagataagaggtttcaacttatcaaagaaatagggcatggagcatacggcatagtgtgttcagcgcggtttgcagaagctgccgaagataccacagttgccatcaagaaagtgacaaacgttttttcgaagaccttactatgtaaaagatccctacgtgagctaaagcttttgagacatttcagaggccacaaaaatattacatgtctttatgatatggatattgttttttatccagacgggtctatcaatggactatatctttatgaggaacttatggaatgtgatatgcaccaaatcatcaaatccggtcaacctttgacggatgctcactatcaaagtttcacataccaaatattatgtggtttaaagtatattcattctgcagatgtcttgcatcgtgatttgaagcccggcaatttgcttgtcaatgcagattgtcaattgaaaatctgtgattttgggttagctagaggttattcggagaatcctgtcgaaaacagtcaatttttgacggagtacgtggccactagatggtatagagctccggaaataatgttgagttaccaaggatataccaaggcgattgacgtatggtcagctggctgtattttagcggagtttcttggtggaaagccaatcttcaaaggaaaggattacgttaatcaattgaatcaaatattacaagttttagggacacccccagacgaaactttaagaaggattggttctaaaaatgttcaggactacatacatcaattaggtttcattccaaaagtaccttttgtcaatttatacccaaatgccaattcacaagcattagacttattggagcaaatgctcgcgtttgaccctcaaaagagaattaccgtggatgaggccctggagcatccttacttgtctatatggcatgatccagctgacgaacctgtgtgtagtgaaaaattcgaatttagttttgaatcggttaatgatatggaggacttaaaacaaatggttatacaagaagtgcaagatttcaggctgtttgtgagacaaccgctattagaagagcaaaggcaattacaattacagcagcagcaacagcagcagcaacagcaacagcaacagcaacagcagccttcagatgtggataatggcaacgccgcagcgagtgaagaaaattatccaaaacagatggccacgtctaattctgttgcgccacaacaagaatcatttggtattcactcccaaaatttgccaaggcatgatgcagatttcccacctcgacctcaagagagtatgatggagatgagacctgccactggaaataccgcagatattccgcctcagaatgataacggcacgcttctagaccttgaaaaagagctggagtttggattagatagaaaatatttttag

SEQ ID NO: 334 - protein, 484 aa, Saccharomyces cerevisiae
MADKIERHTFKVFNQDFSVDKRFQLIKEIGHGAYGIVCSARFAEAAEDTTVAIKKVTNVFSKTLLCKRSLRELKLLRHFRGHKNITCLYDMDIVFYPDGSINGLYLYEELMECDMHQIIKSGQPLTDAHYQSFTYQILCGLKYIHSADVLHRDLKPGNLLVNADCQLKICDFGLARGYSENPVENSQFLTEYVATRWYRAPEIMLSYQGYTKAIDVWSAGCILAEFLGGKPIFKGKDYVNQLNQILQVLGTPPDETLRRIGSKNVQDYIHQLGFIPKVPFVNLYPNANSQALDLLEQMLAFDPQKRITVDEALEHPYLSIWHDPADEPVCSEKFEFSFESVNDMEDLKQMVIQEVQDFRLFVRQPLLEEQRQLQLQQQQQQQQQQQQQQQQPSDVDNGNAAASEENYPKQMATSNSVAPQQESFGIHSQNLPRHDADFPPRPQESMMEMRPATGNTADIPPQNDNGTLLDLEKELEFGLDRKYF

SEQ ID NO: 335 - DNA, 1359 bp, Saccharomyces cerevisiae
atgggtagaagaaaaattgaaattgaacctatcaaagatgatagaaatcgtacagttactttcataaagcgaaaagcaggactatttaaaaaggctcatgaattgtcagtactttgccaagtagacattgctgtcattattttaggatccaataatacattctacgaatactcttctgttgatatgagtaacctgcttaatgttcatcaaaacaacactgatcttcctcataatatcatagaaccatctgattatggtgactatgtgaaaaaaccacgtgttgttctgaatgaaaggaagcgcaggcgaagaagagcaaccgtgttgcaaccagcttcccattctgggagttgtacagtttcgagtcaagattcctccagtgtacaaaacaatgggaatttaagcgctccgttggcgtcaaatgacgccgggaacgctggtgtaagtacaccattggtgcattgccacggagcaatatcacgtagcggatccaatcattctgactgtgcaagaaatagtgcagattatcaaatgttgcaaggcggtttaaattctggtgggagttttcatgctaatgattataaagaaagcgtagaccaacagcatgttgcaaacgaggctattcataggaattttatgaacaagaggattaggccggatactcatttactactttctgaatctaaccactctaattatcataatttttacccgtcgccttacgagaatttgccaaagccttcattgcctgcaagtttagtgggcaatattccatcctttcaatcgcaatttgtacaggttattccggcaaatagtaacccaatgggaaaaggatttaatgggacgggtgacagcgagagctttgaagcaaagcaaaagatacacccgacagttgctatatcaaatactttggaaggtccagctccagtgcaggcgatggtccatcacctgcaccaactgaacagcaatagaggaaagctctcagggaagccatatttaaagctaaatattccgaaggccacaaatgacgcttgccagaggtcgccagcaatgtattcaggaaccgcatcaccgaaaacggatgtacaagccactcccaatcaaatgctcgccagcaacatgtcctcccctctttctcgttcaaagtttttgggattcaagaacaatgatatggacgacttatatcataatggccgatgtggcagcacttatgtaaataacaaaacattctttctgaaaccgccaattggaagaccgcctaaatttccgaaaagcccgtcttcatctattgtggtttttccttcctcggtagctagttcaactttgaaatccacgagttcgacaaactctccagattaa

SEQ ID NO: 336 - protein, 452 aa, Saccharomyces cerevisiae
MGRRKIEIEPIKDDRNRTVTFIKRKAGLFKKAHELSVLCQVDIAVIILGSNNTFYEYSSVDMSNLLNVHQNNTDLPHNIIEPSDYGDYVKKPRVVLNERKRRRRRATVLQPASHSGSCTVSSQDSSSVQNNGNLSAPLASNDAGNAGVSTPLVHCHGAISRSGSNHSDCARNSADYQMLQGGLNSGGSFHANDYKESVDQQHVANEAIHRNFMNKRIRPDTHLLLSESNHSNYHNFYPSPYENLPKPSLPASLVGNIPSFQSQFVQVIPANSNPMGKGFNGTGDSESFEAKQKIHPTVAISNTLEGPAPVQAMVHHLHQLNSNRGKLSGKPYLKLNIPKATNDACQRSPAMYSGTASPKTDVQATPNQMLASNMSSPLSRSKFLGFKNNDMDDLYHNGRCGSTYVNNKTFFLKPPIGRPPKFPKSPSSSIVVFPSSVASSTLKSTSSTNSPD

SEQ ID NO: 337 - DNA, 1902 bp, Saccharomyces cerevisiae
atgagcagtaacaacaacacaaacacagcacctgccaatgcaaattctagccaccaccaccaccatcaccaccatcaccaccaccatcacggtcatggcggaagcaactcgacgctaaacaatcccaagtcgtccttagcggatggtgcacatatcgggaactaccaaatcgtcaaaacgctgggagaggggtcctttggtaaagttaaattggcatatcataccactacgggccaaaaagttgctctaaaaatcattaataagaaggttttggcaaagagtgatatgcagggcagaattgaaagagaaatatcttatctgagactcttaagacacccccacatcatcaaactgtatgatgttatcaaatccaaagatgaaatcattatggttatagagtacgccgggaacgaattgtttgactatattgttcagagagacaaaatgagcgagcaagaggcaagaagatttttccagcagatcatcagtgccgtcgagtactgccataggcacaaaattgtccatagagatctgaagcctgaaaacttactactagatgagcatctgaatgtaaagattgccgattttggtttgtcaaacatcatgactgatggtaatttcttaaagacttcttgtggttctcccaattatgcggctcctgaagttatcagcggtaagctgtacgcaggcccagaagtggacgtgtggtcatgtggggttatcctttatgttatgctttgtcgtcgtctaccgtttgacgatgaaagcatcccagtgcttttcaagaatatcagcaacggtgtttacaccttgcctaaatttttatctcctggagctgctgggctaatcaaaagaatgttaatcgttaatccattgaacagaataagcattcatgaaattatgcaagacgattggttcaaagttgacctgccagaatatctacttccaccagatttgaaaccacacccagaagaagagaatgaaaataatgactcaaaaaaggatggcagcagcccagataacgatgaaattgatgacaaccttgtcaatattttatcatcgaccatgggttacgaaaaagacgagatttatgagtccttagaatcatcagaagacactcctgcattcaacgaaattagggacgcgtacatgttgattaaggagaataaatctttgatcaaggatatgaaggcaaacaaaagcgtcagtgatgaactggatacctttctgtcccagtcacctccaacttttcaacaacaaagcaaatcccatcaaaagagtcaagtagatcatgaaactgccaagcaacacgcaagaaggatggcaagtgctatcactcaacaaaggacatatcaccaatcacccttcatggatcagtataaagaagaagactctacagtttccattttgcctacatctttacctcagatccacagagctaatatgttagcacaaggttcgccagctgcctctaaaatatctcctcttgtaacgaaaaaatctaaaacgagatggcattttggtatacgatctcgctcatatccattagacgttatgggtgaaatttatattgccttgaagaatttgggtgccgaatgggccaagccatctgaagaggatttatggactatcaaattaaggtggaaatatgatattggaaacaagacaaacactaatgaaaaaatacctgatttaatgaaaatggtaattcaattatttcaaattgaaaccaataattatttggtggatttcaaatttgacggctgggaaagtagttatggagatgatactactgtttctaatatttctgaagatgaaatgagtactttttcagcctacccatttttacatttaacaacaaaactaattatggaattagccgttaacagtcaaagcaattga

SEQ ID NO: 338 - protein, 633 aa, Saccharomyces cerevisiae
MSSNNNTNTAPANANSSHHHHHHHHHHHHHGHGGSNSTLNNPKSSLADGAHIGNYQIVKTLGEGSFGKVKLAYHTTTGQKVALKIINKKVLAKSDMQGRIEREISYLRLLRHPHIIKLYDVIKSKDEIIMVIEYAGNELFDYIVQRDKMSEQEARRFFQQIISAVEYCHRHKIVHRDLKPENLLLDEHLNVKIADFGLSNIMTDGNFLKTSCGSPNYAAPEVISGKLYAGPEVDVWSCGVILYVMLCRRLPFDDESIPVLFKNISNGVYTLPKFLSPGAAGLIKRMLIVNPLNRISIHEIMQDDWFKVDLPEYLLPPDLKPHPEEENENNDSKKDGSSPDNDEIDDNLVNILSSTMGYEKDEIYESLESSEDTPAFNEIRDAYMLIKENKSLIKDMKANKSVSDELDTFLSQSPPTFQQQSKSHQKSQVDHETAKQHARRMASAITQQRTYHQSPFMDQYKEEDSTVSILPTSLPQIHRANMLAQGSPAASKISPLVTKKSKTRWHFGIRSRSYPLDVMGEIYIALKNLGAEWAKPSEEDLWTIKLRWKYDIGNKTNTNEKIPDLMKMVIQLFQIETNNYLVDFKFDGWESSYGDDTTVSNISEDEMSTFSAYPFLHLTTKLIMELAVNSQSN

SEQ ID NO: 339 - DNA, 5112 bp, Saccharomyces cerevisiae
atgaacataccacagcgtcaatttagcaacgaagaggtcaaccgctgctatttaagatggcagcatttgagaaatgaacacggaatgaacgctccgagtgtgccggaatttatctatttgactaaagtgttgcaatttgctgccaagcagcgacaagaattacaaatgcaacgccaacagcaaggcatttcaggttctcagcaaaatattgttccaaattcttcagatcaagcagaactgccgaataatgcttcctcgcacatttctgcttctgcttccccgcatttagctccgaatatgcaattgaatggaaatgagacctttagcacttctgctcatcaatcaccaatcatgcaaacacagatgccattaaatagcaatggtggtaataacatgctaccacaacggcaatcttcggttggttcattaaatgcaactaatttttcaccaacaccagcaaacaatggagaaaatgctgcggagaaaccagataactcaaaccataataacttaaaccttaataattccgagcttcaaccgcaaaatcgatcattacaagaacacaacatacaggattcaaatgtgatgccaggttcgcagataaattctcctatgccccagcaggcgcagatgcagcaggcacaattccaagcacaacaggcgcaacaagcgcaacaggcacaacaggcacaacaagcacaagcgagactgcaacaggggagaagattacccatgacaatgtttactgccgagcaatccgaactgttaaaggcccaaatcacatctctaaaatgtctagtaaatagaaagcctattccgtttgaatttcaggctgttatccaaaaatctattaaccatcctccagatttcaaaagaatgttactgtctttgagtgagtttgcgagaagaagacaacccacagatcaaaataaccaatcaaatctcaatggcggcaacaatacgcagcaacccggcaccaattcccactacaataacactaacactgacaacgtttctgggcttaccagaaatgcacctttagatagcaaagacgaaaattttgcatctgtttcaccagctggtccatctagtgtacataatgcgaagaatggcaccctcgataaaaattcgcaaactgtaagtggcactccaatcacgcaaacagaatcgaaaaaagaggaaaacgaaaccatttcaaacgtagctaaaacagctcctaatagtaataagacccacaccgagcaaaataacccgccaaaaccgcagaaacccgttcctttaaacgtccttcaagatcaatataaggaaggaataaaagtggtagatatagatgatcctgatatgatggttgattcttttacgatgcccaatatctcacatagtaatatcgattatcagactttattggccaattcggatcatgcaaagtttactattgaacctggcgttctaccggttggtattgacacacataccgctactgacatttaccaaactttaattgcattgaacctagatactacggtaaatgactgtttggataagctactaaatgacgaatgtacggaatcaaccagggaaaatgctctttacgattactacgccttacaattattaccgttacaaaaagccgtaagaggtcatgtattacaatttgaatggcatcaaaattctttattaaccaatacacatccaaattttctttcgaaaataagaaacatcaacgttcaagatgcattgctaacaaaccaactttataagaatcatgaattacttaagttagaaaggaagaagactgaggcagtggccagattaaagtcgatgaataaatccgccatcaatcaatataatagaagacaagataaaaagaataaaaggttgaagtttggccatagactcattgctacgcatactaatttagaaagggatgagcaaaagagagctgaaaaaaaggcaaaagaacgtttacaggctttaaaggcgaacgatgaggaagcctatataaaattattagaccaaaccaaagatacaagaattacacatcttctaaggcaaacaaacgcatttttagattctttaacaagagccgtgaaagatcaacaaaagtacactaaagaaatgattgattcccacataaaggaagcatcggaggaagtggatgatttgtccatggtccccaagatgaaggatgaagaatatgatgacgacgacgacaattctaacgtcgattattacaatgtcgcacatagaattaaagaagatatcaagaagcagccttcaatattggttggtggtaccttaaaggactatcaaatcaagggtttacagtggatggtttcgcttttcaataatcatttaaatggtattttagcagacgaaatgggtcttggtaagactatccagacgatatccttacttacatatttatatgaaatgaagaatattcgtgggccatatttagtcattgttcctttatctacactgtcaaattggagcagtgaattcgcgaaatgggctcctaccttaagaactatatcatttaaaggttcgccaaatgagaggaaagccaaacaggctaaaataagggcaggtgaatttgatgtagttctgactacctttgagtatattattaaagaaagagcacttttatccaaggtcaagtgggtccatatgattattgatgaaggccatagaatgaaaaatgcgcaatccaagctttctttaaccttgaacacacattaccatgcagattatagattaattttgacaggtacaccacttcaaaacaacttgccagaattatgggccttattgaattttgtgttacccaagattttcaattccgtgaaatcttttgatgaatggttcaatacaccctttgccaacaccggtgggcaagataaaattgagttgagtgaagaagagacgcttttggttatcaggagattgcataaagtcttgagaccctttttattgcgtcgtttgaaaaaggatgtagaaaaagaattaccggataaagttgagaaggtagtgaagtgcaaaatgagcgctttacaacaaattatgtaccaacaaatgttgaaatatcgtcgtctttttatcggtgatcaaaataataagaaaatggtaggtttaagaggtttcaataatcaaatcatgcaactaaagaaaatctgtaatcatccttttgtatttgaagaagttgaggaccaaatcaatccaacaagagaaacgaatgatgatatttggcgtgttgctggtaaatttgaactattagatagaattttgcctaagcttaaggcaactgggcatagagtattaattttttttcaaatgacccaaattatggatattatggaagattttttaaggtacattaatatcaagtacctgaggttagatggtcatacaaaatctgatgaacgtagtgagttgttacgtctatttaacgcccctgattctgaatacttgtgctttatcttatcaactagagcgggtggtttgggtttaaatttacaaactgcagacactgtcattatttttgatactgactggaatcctcatcaagatttgcaagctcaggatagagcgcatagaataggtcagaagaatgaagttagaattctaagattgattactacgaattcagttgaagaagttatcctagagagagcctacaagaagctagatatcgatggtaaagtcattcaagcaggtaaattcgataacaaatctacatcggaggaacaagaagcgttgcttagatctttgctggatgcagaagaggaacgtagaaagaaaagagagtctggtgttgaagaagaagaggagttaaaagactcagaaatcaacgaaattcttgctcgaaatgacgaagaaatggctgttcttacaaggatggatgaagatagatcaaagaaggaggaagaattgggagtaaagagccgtctcttagaaaagagtgaattacctgatatttacagtagagatattggtgccgagctcaaacgtgaagaatcagaatctgctgctgtttacaatggaaggggtgcaagagaacgtaagacggcaacttacaacgataatatgtctgaagaacagtggttaagacaatttgaagttagcgatgatgaaaaaaatgacaagcaggcaagaaaacaacgaacaaagaaggaagataagagcgaggcgattgatgggaatggagaaattaaaggcgaaaacattgacgctgataatgacggtcctagaattaataatatatcggccgaagatcgggcagatacggatttggcaatgaatgacgatgatttcttgtctaaaaagagaaaggcaggaaggccccgtggaagacctaagaaagtgaaacttgaaggatctgaaaattctgaaccaccagcgcttgaatcaagtccagttactggcgataactctcccagtgaggattttatggacattccaaaaccacgtacagcgggaaaaacatctgttaaatcagcaagaacttcaacaaggggccgtggtcgcggtcgtggtcgtggtcgagggcgaggacgtggacgaggaaggccgccaaaagcaagaaatgggcttgattatgtccgcacgcccgctgcggcaacgagtcctattgatattagagagaaagttgctaaacaagctctagacttataccactttgctctcaattatgaaaatgaagctggaaggaaactttctgacattttcctctccaaaccttccaaagcactatatcccgactactatatgattattaagtaccctgtcgcctttgataatattaacacgcatattgaaacgctagcttacaactcccttaaagagacccttcaagactttcatctgatattttccaatgctaggatatacaatactgagggttcagtagtatacgaagactctttagaactggaaaaagtggttacgaagaaatactgtgagataatgggcgataactcacaactcgactttactgaatttgatgaacagtatggcaccagacccctcgtcttgcctcctgttgttacttcaagcgtggctgaatctttcacagatgaagcggactcgagcatgacagaagcgagtgtatag

SEQ ID NO: 340 - protein, 1703 aa, Saccharomyces cerevisiae
MNIPQRQFSNEEVNRCYLRWQHLRNEHGMNAPSVPEFIYLTKVLQFAAKQRQELQMQRQQQGISGSQQNIVPNSSDQAELPNNASSHISASASPHLAPNMQLNGNETFSTSAHQSPIMQTQMPLNSNGGNNMLPQRQSSVGSLNATNFSPTPANNGENAAEKPDNSNHNNLNLNNSELQPQNRSLQEHNIQDSNVMPGSQINSPMPQQAQMQQAQFQAQQAQQAQQAQQAQQAQARLQQGRRLPMTMFTAEQSELLKAQITSLKCLVNRKPIPFEFQAVIQKSINHPPDFKRMLLSLSEFARRRQPTDQNNQSNLNGGNNTQQPGTNSHYNNTNTDNVSGLTRNAPLDSKDENFASVSPAGPSSVHNAKNGTLDKNSQTVSGTPITQTESKKEENETISNVAKTAPNSNKTHTEQNNPPKPQKPVPLNVLQDQYKEGIKVVDIDDPDMMVDSFTMPNISHSNIDYQTLLANSDHAKFTIEPGVLPVGIDTHTATDIYQTLIALNLDTTVNDCLDKLLNDECTESTRENALYDYYALQLLPLQKAVRGHVLQFEWHQNSLLTNTHPNFLSKIRNINVQDALLTNQLYKNHELLKLERKKTEAVARLKSMNKSAINQYNRRQDKKNKRLKFGHRLIATHTNLERDEQKRAEKKAKERLQALKANDEEAYIKLLDQTKDTRITHLLRQTNAFLDSLTRAVKDQQKYTKEMIDSHIKEASEEVDDLSMVPKMKDEEYDDDDDNSNVDYYNVAHRIKEDIKKQPSILVGGTLKDYQIKGLQWMVSLFNNHLNGILADEMGLGKTIQTISLLTYLYEMKNIRGPYLVIVPLSTLSNWSSEFAKWAPTLRTISFKGSPNERKAKQAKIRAGEFDVVLTTFEYIIKERALLSKVKWVHMIIDEGHRMKNAQSKLSLTLNTHYHADYRLILTGTPLQNNLPELWALLNFVLPKIFNSVKSFDEWFNTPFANTGGQDKIELSEEETLLVIRRLHKVLRPFLLRRLKKDVEKELPDKVEKVVKCKMSALQQIMYQQMLKYRRLFIGDQNNKKMVGLRGFNNQIMQLKKICNHPFVFEEVEDQINPTRETNDDIWRVAGKFELLDRILPKLKATGHRVLIFFQMTQIMDIMEDFLRYINIKYLRLDGHTKSDERSELLRLFNAPDSEYLCFILSTRAGGLGLNLQTADTVIIFDTDWNPHQDLQAQDRAHRIGQKNEVRILRLITTNSVEEVILERAYKKLDIDGKVIQAGKFDNKSTSEEQEALLRSLLDAEEERRKKRESGVEEEEELKDSEINEILARNDEEMAVLTRMDEDRSKKEEELGVKSRLLEKSELPDIYSRDIGAELKREESESAAVYNGRGARERKTATYNDNMSEEQWLRQFEVSDDEKNDKQARKQRTKKEDKSEAIDGNGEIKGENIDADNDGPRINNISAEDRADTDLAMNDDDFLSKKRKAGRPRGRPKKVKLEGSENSEPPALESSPVTGDNSPSEDFMDIPKPRTAGKTSVKSARTSTRGRGRGRGRGRGRGRGRGRPPKARNGLDYVRTPAAATSPIDIREKVAKQALDLYHFALNYENEAGRKLSDIFLSKPSKALYPDYYMIIKYPVAFDNINTHIETLAYNSLKETLQDFHLIFSNARIYNTEGSVVYEDSLELEKVVTKKYCEIMGDNSQLDFTEFDEQYGTRPLVLPPVVTSSVAESFTDEADSSMTEASV

SEQ ID NO: 341 - DNA, 723 bp, Saccharomyces cerevisiae
atgtggtcatcactttttggttggacatcaagtaatgccaagaataaagagtcaccaacaaaggccatagtgcggttgagggagcatatcaaccttctatccaaaaagcaatcgcatttacgtactcaaattacaaatcaagagaatgaagctagaatctttttgacgaagggcaataaagtaatggcgaagaatgcacttaaaaagaagaagacaatcgaacaacttttaagtaaggtagaaggcacaatggagtctatggaacagcagctattctctatagaaagtgcaaacttaaatctagagacaatgagggctatgcaggaaggtgctaaggcaatgaaaactattcacagtggccttgacatagataaagtggatgaaactatggacgagataagggagcaagtcgaattaggagatgaaataagcgacgctatatccaggcctttaattactggggcaaacgaggtggatgaagatgagctggacgaggaattggacatgctggctcaagaaaatgctaaccaagaaacgtccaagatcgttaataataatgttaatgcggcgcctatctcagagaacaaagtctcactacctagtgttccaagtaataaaattaaacaaagtgagaactctgtgaaggacggggaagaggaagaggatgaagaagatgaagatgaaaaagcattaagagaactacaagcagaaatggggctttga

SEQ ID NO: 342 - protein, 240 aa, Saccharomyces cerevisiae
MWSSLFGWTSSNAKNKESPTKAIVRLREHINLLSKKQSHLRTQITNQENEARIFLTKGNKVMAKNALKKKKTIEQLLSKVEGTMESMEQQLFSIESANLNLETMRAMQEGAKAMKTIHSGLDIDKVDETMDEIREQVELGDEISDAISRPLITGANEVDEDELDEELDMLAQENANQETSKIVNNNVNAAPISENKVSLPSVPSNKIKQSENSVKDGEEEEDEEDEDEKALRELQAEMGL

SEQ ID NO: 343 - DNA, 702 bp, Saccharomyces cerevisiae
atgaaacagtttggactggcagcctttgacgagttgaaggatggaaagtacaatgacgtaaacaaaaccatacttgaaaagcaatctgtcgaactaagggaccaattaatggtattccaagaacgactggtagaatttgccaagaaacacaatagcgagcttcaagcttcacctgaattccgctcaaaattcatgcatatgtgctcatctattgggattgatcccctatctttatttgatcgagataagcacttatttacagtgaatgatttttattatgaagtatgtcttaaagttatagaaatttgtcggcaaactaaagatatgaatggaggcgtcatttcttttcaagagttggagaaggtgcattttcgtaagctgaatgttggactcgatgatttggaaaaatctatcgacatgctaaagagcctagagtgttttgagatatttcaaattcgcggcaaaaagtttttacgaagtgttccaaatgagttgacatcagatcaaacaaagattttggaaatatgctcaattctgggctactcaagtatctctttattaaaggcaaacttgggatgggaggctgttaggagtaaatctgctcttgatgaaatggtcgctaacggtttattgtggattgattatcaaggtggtgcagaggcgttgtattgggatccctcttggattacgaggcaactgtga

SEQ ID NO: 344 - protein, 233 aa, Saccharomyces cerevisiae
MKQFGLAAFDELKDGKYNDVNKTILEKQSVELRDQLMVFQERLVEFAKKHNSELQASPEFRSKFMHMCSSIGIDPLSLFDRDKHLFTVNDFYYEVCLKVIEICRQTKDMNGGVISFQELEKVHFRKLNVGLDDLEKSIDMLKSLECFEIFQIRGKKFLRSVPNELTSDQTKILEICSILGYSSISLLKANLGWEAVRSKSALDEMVANGLLWIDYQGGAEALYWDPSWITRQL

SEQ ID NO: 345 - DNA, 4506 bp, Saccharomyces cerevisiae
atgagcaatatcaaaagcacgcaagatagctctcataatgctgtcgctagaagctcaagcgcttcttttgcagcttcagaagaatcatttacgggcataacccatgacaaagatgagcagagcgataccccggcggataaactaacaaaaatgctgacaggacctgcaagagacactgcgagccagattagtgccactgtgtctgaaatggcgccagatgtcgtatctaaagtggagtcatttgcagatgcactatcccgtcatacaacgagaagcggtgcctttaatatggattcagatagtgacgatgggttcgatgcccatgccatctttgaaagttttgtaagagacgctgatgagcaaggcatccatatccgcaaggctggtgttaccatagaggacgtaagcgctaaaggtgtggatgcgagtgccctagaaggtgctacctttggtaacattctttgtttaccgttgaccatctttaaaggtattaaggctaagaggcatcaaaagatgagacagatcataagcaatgtcaatgccctggcagaagcgggtgaaatgattttggttcttggaaggcctggtgctggttgttcctcctttttaaaagtaacagctggtgaaatagatcagtttgccggtggtgtttccggtgaagtagcatatgatggtattccccaagaagaaatgatgaaacgatataaagcagatgttatttacaatggtgagttggatgttcatttcccttatttaacagttaagcaaactttggatttcgctattgcctgcaaaacgcctgctctcagagtcaataacgtttccaaaaaggaatacattgcatccagaagagatttatatgcaaccattttcggtctaaggcatacctataataccaaagttggtaacgatttcgttagaggtgtatctggtggtgaacgtaagcgtgtttccattgccgaggctttggcagccaaaggttccatttactgttgggataatgccactagaggtttggatgcgtctacggccttagaatacgcaaaagccatccgtattatgacaaacttattgaaatcaaccgcttttgttacaatttatcaggcaagtgaaaacatttacgaaacatttgataaagtcactgtcctttattctggtaagcaaatttattttggtttgatccacgaggcaaaaccttatttcgcaaaaatgggttatttgtgtcctccaaggcaagcaacagctgaatttttaaccgcgttgactgatccaaatggattccatctgatcaagccaggttatgaaaataaagtaccaagaaccgctgaggaattcgaaacatattggttaaattctccagagtttgctcaaatgaaaaaagatatcgctgcttataaagagaaggtcaataccgaaaagactaaagaagtttatgacgaatcgatggctcaagagaaatccaaatatacgagaaagaagtcttattatacagtgtcatattgggaacaagttaaactgtgtacccaacgtgggttccaaagaatttacggtaacaagagttatacagtcatcaatgtctgctctgcaataattcaatcttttattactggatcattattttacaataccccttcatccacttccggtgctttttcaagaggtggtgtgttgtattttgcgctactatattattctttgatgggactggcgaatatttcttttgaacataggccaatcttacaaaagcacaagggctattctttgtatcatccttcagctgaggcaattggctccactctggcatctttccccttcagaatgattggtttgacctgtttctttatcattttattcttcctatctgggttgcacagaacagcgggatcattttttaccatctatttgttcttaaccatgtgttcagaggcgatcaatggtttatttgagatggtttcttcagtatgtgacactctttctcaagctaactctatctcgggtattctgatgatgtctatctcaatgtactctacctatatgatccaattgccttcgatgcatccatggtttaaatggatatcgtacgtactacctatcaggtacgccttcgagtcgatgttaaatgccgaatttcacggtaggcatatggattgtgctaacactctagtacccagtggaggagactatgataatttatccgatgactacaaagtatgtgcttttgttggttcgaaaccaggtcagtcttatgtgcttggtgatgactaccttaaaaatcaatttcagtacgtttataagcacacgtggagaaactttggtatcttgtggtgctttttactgggttatgttgttttgaaagtgatattcacagaatataagaggcctgtgaaaggtggtggtgatgctcttatcttcaagaaaggatcaaaaagatttatcgcacatgcagatgaagaatctccagacaatgtcaatgatatagatgccaaagagcaattctccagtgaaagtagcggcgcaaatgatgaagtatttgatgatttagaagccaaaggtgttttcatttggaaggacgtatgctttactattccatatgaaggcggtaagagaatgcttttggataatgtttcaggttattgtattccaggtaccatgacggccttgatgggagagtcaggtgctggtaaaacaactttgttaaatactcttgctcaaagaaatgtcggtatcattactggtgatatgcttgtcaatggacgtcccattgatgcgagtttcgaaaggcgtacaggttatgtacaacaacaggatatacatatcgcagagttaactgttagggaatcgttgcagttttctgctcgtatgcgtcgccctcagcatttgcctgattctgaaaaaatggattatgtggaaaaaatcatcagagttttgggaatggaagagtatgcggaagcccttgttggtgaggttggttgtggtttaaacgttgaacagagaaagaagctgtctattggtgttgaactagtcgccaaaccagacttattattattcctcgatgaacctacatcaggtttggattctcaatcttcatgggccattattcaattattaagaaagttatcaaaagctggccaatccattctttgtacgatccatcaaccttcagctactctgttcgaagagtttgatagattactacttttgaggaagggtggacaaactgtttatttcggagatattggtaagaactctgccaccattttgaactactttgaaaggaatggggcaagaaaatgtgattctagtgaaaatcctgctgaatatattttagaggctattggtgccggtgccacagcatccgtcaaagaagactggcacgaaaaatggttgaactctgtcgagtttgaacaaacaaaagaaaaagtacaggatttaataaatgatttatcgaaacaagaaactaaatccgaagttggagacaaaccttccaaatatgctacttcttatgcttaccagttcagatatgttttaatcagaacctctacttcattttggagaagtctgaattacatcatgtcaaagatgatgctaatgctggttggtggtctgtatattggtttcacatttttcaatgttggtaaaagttatgtcggcttacaaaatgcgatgttcgcggcatttatctctattatcttgtctgctcctgcaatgaaccaaatccaaggacgtgctattgcctccagagaactttttgaagttagggaatcccaatctaacatgtttcactggtcgctggtgttgatcactcagtacttgagcgaacttccctatcatttatttttttcgacaattttctttgtctcatcgtattttccattaagaatcttcttcgaagcgtcaagatctgcggtgtactttttgaattactgcattatgttccagttatactatgttggtcttggcttaatgatcctatatatgtcaccgaaccttccatccgctaatgttatcttaggtttgtgtctgtcatttatgctttctttctgtggtgttacacaacctgtctcattgatgcctggcttctggacattcatgtggaaggcttccccatacacatattttgttcagaatctggtcggaattatgctgcacaaaaaaccagtcgtatgcaaaaagaaagaactaaactacttcaacccaccaaacggctcaacgtgtggagagtacatgaaaccctttttggaaaaagctactggttacatcgaaaatcctgatgctacgtcagattgtgcatactgtatttacgaagttggagataattatttgacacatatcagctctaagtatagctacttgtggagaaattttggaatattttggatttacattttcttcaatatcattgctatggtttgtgtgtattacctcttccatgtaagacaatcttccttcctaagccccgtatctatactcaataaaattaaaaacataaggaaaaagaagcagtaa

SEQ ID NO: 346 - protein, 1501 aa, Saccharomyces cerevisiae
MSNIKSTQDSSHNAVARSSSASFAASEESFTGITHDKDEQSDTPADKLTKMLTGPARDTASQISATVSEMAPDVVSKVESFADALSRHTTRSGAFNMDSDSDDGFDAHAIFESFVRDADEQGIHIRKAGVTIEDVSAKGVDASALEGATFGNILCLPLTIFKGIKAKRHQKMRQIISNVNALAEAGEMILVLGRPGAGCSSFLKVTAGEIDQFAGGVSGEVAYDGIPQEEMMKRYKADVIYNGELDVHFPYLTVKQTLDFAIACKTPALRVNNVSKKEYIASRRDLYATIFGLRHTYNTKVGNDFVRGVSGGERKRVSIAEALAAKGSIYCWDNATRGLDASTALEYAKAIRIMTNLLKSTAFVTIYQASENIYETFDKVTVLYSGKQIYFGLIHEAKPYFAKMGYLCPPRQATAEFLTALTDPNGFHLIKPGYENKVPRTAEEFETYWLNSPEFAQMKKDIAAYKEKVNTEKTKEVYDESMAQEKSKYTRKKSYYTVSYWEQVKLCTQRGFQRIYGNKSYTVINVCSAIIQSFITGSLFYNTPSSTSGAFSRGGVLYFALLYYSLMGLANISFEHRPILQKHKGYSLYHPSAEAIGSTLASFPFRMIGLTCFFIILFFLSGLHRTAGSFFTIYLFLTMCSEAINGLFEMVSSVCDTLSQANSISGILMMSISMYSTYMIQLPSMHPWFKWISYVLPIRYAFESMLNAEFHGRHMDCANTLVPSGGDYDNLSDDYKVCAFVGSKPGQSYVLGDDYLKNQFQYVYKHTWRNFGILWCFLLGYVVLKVIFTEYKRPVKGGGDALIFKKGSKRFIAHADEESPDNVNDIDAKEQFSSESSGANDEVFDDLEAKGVFIWKDVCFTIPYEGGKRMLLDNVSGYCIPGTMTALMGESGAGKTTLLNTLAQRNVGIITGDMLVNGRPIDASFERRTGYVQQQDIHIAELTVRESLQFSARMRRPQHLPDSEKMDYVEKIIRVLGMEEYAEALVGEVGCGLNVEQRKKLSIGVELVAKPDLLLFLDEPTSGLDSQSSWAIIQLLRKLSKAGQSILCTIHQPSATLFEEFDRLLLLRKGGQTVYFGDIGKNSATILNYFERNGARKCDSSENPAEYILEAIGAGATASVKEDWHEKWLNSVEFEQTKEKVQDLINDLSKQETKSEVGDKPSKYATSYAYQFRYVLIRTSTSFWRSLNYIMSKMMLMLVGGLYIGFTFFNVGKSYVGLQNAMFAAFISIILSAPAMNQIQGRAIASRELFEVRESQSNMFHWSLVLITQYLSELPYHLFFSTIFFVSSYFPLRIFFEASRSAVYFLNYCIMFQLYYVGLGLMILYMSPNLPSANVILGLCLSFMLSFCGVTQPVSLMPGFWTFMWKASPYTYFVQNLVGIMLHKKPVVCKKKELNYFNPPNGSTCGEYMKPFLEKATGYIENPDATSDCAYCIYEVGDNYLTHISSKYSYLWRNFGIFWIYIFFNIIAMVCVYYLFHVRQSSFLSPVSILNKIKNIRKKKQ

SEQ ID NO: 347 - DNA, 2358 bp, Saccharomyces cerevisiae
atgcccatcggtaacccaatcaatacgaatgatatcaagtccaaccgcatgcgccaggaatcaaatatgagtgccgtgagcaatagcgaaagtactattggccagtccacccaacagcagcagcaacaacaacaatatctcggccagagcgttcaacctctgatgcccgtatcctaccaatacgtagttcctgaacagtggccgtacccgcaatattatcagcagccgcaatcccagtctcaacagcaactgcaatcccagcctcagatgtatcaagttcaagaatcctttcagagtagcggttctgactcaaatgcttccaatccaccttccacgtctgtaggtgttccttccaacgctactgcaactgcgttaccgaatggttctgcaatcaccaccaaaaaaagcaataacagtactaatatcagtaacaatgtaccatactactattattttccccaaatgcaagcccaacaatcaatggcatattcgtatccacaagcgtattattattatcctgcaaacggcgatggaaccactaacggtgcaacaccatctgtaaccagtaatcaagtccaaaaccccaatttggaaaaaacctactcaacctttgaacaacagcaacaacaccagcagcaacaacaattacaagctcaaacgtatccggcccaaccaccaaagataggtaatgcattttcaaagttcagtaaatctggaccaccttctgattcgtccagtggctctatgtctcccaattctaatcgcactagtcgcaatagtaatagtatctcgtccttagctcagcagcctccaatgtcaaactatccacaaccttccacctaccaataccccggttttcacaagacttcgtcaattccaaactcgcattctccaattcctccaagatcattaacaacgccaactcaaggtccaaccagccaaaatggacctttaagctacaatcttccgcaagtgggtttgctaccgcctcagcaacaacaacaggtgagcccgttgtatgatggaaattctataactccaccagttaaaccctctactgatcaagaaacttatttaactgcaaataggcacggagtgtcagatcaacagtatgactcaatggctaaaaccatgaattctttccaaacaactaccataaggcacccgatgcccttaatcgccactaccaatgccacaggcagtaacaccagcggcacttcggcaagtataataaggccaagagtaacaacaacaatgtgggaggatgaaaaaacgctatgttatcaggtagaagctaacggtatttcagtggtaagaagagcagataatgatatggttaatggtaccaaacttctgaatgtaactaagatgacaagaggtagaagagatggtattctaaaagcggaaaaaatcaggcatgtggtgaagattggttccatgcatttgaagggtgtctggataccgtttgagcgtgccctagcaatagcacaaagagaaaaaattgctgactatctttatcccttgttcatcagggatattcagagcgtattgaaacaaaataatccaagcaatgatagcagtagtagtagcagtagcactggtattaaatccatcagtccgcgtacctattatcaacctattaacaactatcaaaatcctaatggtccttcaaatatatctgctgctcagctgacatactcctcaatgaatttgaacaacaaaattatacccaataattctataccagctgtaagtacaatcgctgcgggtgaaaagcccttgaaaaaatgcacaatgcctaactctaaccaactagaaggacatactataactaacctacagaccctttcggcaacaatgccgatgaaacaacaactgatgggcaacatagcttcacccttatcgtatccacgcaacgccacaatgaattcggcaagtacattaggcattacacctgcagattcaaagcctttgacaccttctccaactacaacaaacacaaatcaatcatctgaatcaaatgtgggaagtatccatacaggaatcacccttccaagagtggaatctgaatcggcatcacattccaaatggtctaaggaagcagacagtgggaatactgtaccagataatcaaacattaaaggagccacgatctagtcaattaccaatctccgcattgacttcgacggatactgacaaaataaaaacaagtacaagcgatgaagcaacacaaccgaacgaacctagtgaagcagaacctgtcaaggagtcagagtcatccaaatcacaagttgatggagctggcgatgtctccaacgaagaaattgctgctgatgatacaaaaaaacaagaaaaatag

SEQ ID NO: 348 - protein, 785 aa, Saccharomyces cerevisiae
MPIGNPINTNDIKSNRMRQESNMSAVSNSESTIGQSTQQQQQQQQYLGQSVQPLMPVSYQYVVPEQWPYPQYYQQPQSQSQQQLQSQPQMYQVQESFQSSGSDSNASNPPSTSVGVPSNATATALPNGSAITTKKSNNSTNISNNVPYYYYFPQMQAQQSMAYSYPQAYYYYPANGDGTTNGATPSVTSNQVQNPNLEKTYSTFEQQQQHQQQQQLQAQTYPAQPPKIGNAFSKFSKSGPPSDSSSGSMSPNSNRTSRNSNSISSLAQQPPMSNYPQPSTYQYPGFHKTSSIPNSHSPIPPRSLTTPTQGPTSQNGPLSYNLPQVGLLPPQQQQQVSPLYDGNSITPPVKPSTDQETYLTANRHGVSDQQYDSMAKTMNSFQTTTIRHPMPLIATTNATGSNTSGTSASIIRPRVTTTMWEDEKTLCYQVEANGISVVRRADNDMVNGTKLLNVTKMTRGRRDGILKAEKIRHVVKIGSMHLKGVWIPFERALAIAQREKIADYLYPLFIRDIQSVLKQNNPSNDSSSSSSSTGIKSISPRTYYQPINNYQNPNGPSNISAAQLTYSSMNLNNKIIPNNSIPAVSTIAAGEKPLKKCTMPNSNQLEGHTITNLQTLSATMPMKQQLMGNIASPLSYPRNATMNSASTLGITPADSKPLTPSPTTTNTNQSSESNVGSIHTGITLPRVESESASHSKWSKEADSGNTVPDNQTLKEPRSSQLPISALTSTDTDKIKTSTSDEATQPNEPSEAEPVKESESSKSQVDGAGDVSNEEIAADDTKKQEK

SEQ ID NO: 349 - DNA, 1668 bp, Saccharomyces cerevisiae
atgtataatggcaaggatagagcacaaaactcctatcagccaatgtaccaaaggcctatgcaggtacaaggacaacagcaagctcaatcgttcgttggaaagaaaaacacaatcggaagtgtgcatggaaaagccccgatgctaatggccaataatgatgtttttactattggaccttatagggcaagaaaagatagaatgcgggtatctgtcttagaaaagtacgaagttattggctacattgctgcgggcacatatggtaaagtttacaaagcgaaaagacaaatcaactccggtaccaattccgctaatggttctagtctgaatggtaccaatgcgaaaattccgcagtttgacagcacgcaaccaaaatcaagctcttcaatggacatgcaggcaaatacaaacgcattaagaagaaacttgttaaaggatgaaggagtgacccccggaagaatacgaactacgagggaagatgtatccccgcactataattcccaaaaacaaaccctcattaaaaaaccgctgacggtattttatgccattaaaaagttcaagacagagaaggatggcgtcgaacaattgcattatacgggaatatctcagagtgcctgtagagaaatggcattatgtcgagaattgcacaacaagcatttaaccacattagtggaaatttttttggaaaggaaatgtgtccatatggtatacgaatatgcggagcatgatctgctacaaattatccacttccattcccatcccgaaaaaaggatgataccaccaagaatggttcggtctattatgtggcagcttttagacggcgtatcgtatcttcatcaaaattgggtgcttcatcgagatttgaaacccgcaaatataatggtgaccatagatggatgtgttaaaattggtgatttaggtttggccagaaaatttcataatatgctgcaaaccctctatactggggataaagtggttgtcactatatggtaccgtgcacctgagttgctattgggagcacggcactatacccctgcggttgatttatggtccgttggctgcatttttgcagaactgataggattacagcccatatttaaaggtgaagaagctaaactagactctaaaaagactgttccatttcaagtgaatcaactacagagaattttggaagttcttggcactcccgatcaaaaaatttggccttatttggagaagtatccagaatatgatcaaattacgaagtttccaaagtatagggataaccttgctacatggtatcattccgcgggaggaagggacaagcatgctttaagcttactttaccacttgttaaattatgatccaattaaaagaatagatgcatttaatgcgttggaacataagtacttcacagaaagtgatattcctgttagtgaaaatgtatttgaaggtctaacttacaaatacccggcaagaagaattcacacgaacgataatgacatcatgaatcttggatcaagaacgaaaaacaatacacaagcttcaggaatcaccgcaggtgccgctgcaaatgcgttaggtgggcttggtgttaaccgtagaattctggccgcggcagcagcagccgctgctgcggtgtcaggaaacaatgcatcagatgagccatctcgaaagaaaaacagaagatag

SEQ ID NO: 350 - protein, 555 aa, Saccharomyces cerevisiae
MYNGKDRAQNSYQPMYQRPMQVQGQQQAQSFVGKKNTIGSVHGKAPMLMANNDVFTIGPYRARKDRMRVSVLEKYEVIGYIAAGTYGKVYKAKRQINSGTNSANGSSLNGTNAKIPQFDSTQPKSSSSMDMQANTNALRRNLLKDEGVTPGRIRTTREDVSPHYNSQKQTLIKKPLTVFYAIKKFKTEKDGVEQLHYTGISQSACREMALCRELHNKHLTTLVEIFLERKCVHMVYEYAEHDLLQIIHFHSHPEKRMIPPRMVRSIMWQLLDGVSYLHQNWVLHRDLKPANIMVTIDGCVKIGDLGLARKFHNMLQTLYTGDKVVVTIWYRAPELLLGARHYTPAVDLWSVGCIFAELIGLQPIFKGEEAKLDSKKTVPFQVNQLQRILEVLGTPDQKIWPYLEKYPEYDQITKFPKYRDNLATWYHSAGGRDKHALSLLYHLLNYDPIKRIDAFNALEHKYFTESDIPVSENVFEGLTYKYPARRIHTNDNDIMNLGSRTKNNTQASGITAGAAANALGGLGVNRRILAAAAAAAAAVSGNNASDEPSRKKNRR

SEQ ID NO: 351 - DNA, 972 bp, Saccharomyces cerevisiae
atgtcggggagcttctggacatctacacaaaggcatcattggcaatataccaaggcatcattggctaaagagaggcagaagttatggctattggagtgccagctgtttcctcaaggtttgaatattgtaatggattcgaagcaaaacggcatcgaacaatccatcacaaagaatataccaataactcaccgagacttacactatgataaagattataatctaaggatctactgctatttcctgataatgaagcttggaaggagactaaatataagacagtatgcactggctacagcacatatttatctatcaaggtttttaataaaggcttcagttagagaaataaacctatatatgctggttactacgtgtgtatatttagcatgcaaagttgaagaatgcccgcaatatatcagaactttggtaagtgaagcccgtaccttatggcccgaatttattcctcctgaccctactaaagttactgagtttgagttctacttactagaagaattggaaagttacttaattgtccaccacccttatcaatccttaaagcaaattgttcaagtcttaaagcaaccgccatttcaaataacactatcgtcagatgatctacaaaactgttggtccttaatcaacgacagttatataaatgatgttcatttgctttaccctcctcatattatcgctgttgcatgtttattcattacgatttccattcatgggaaaccaaccaaaggatcatcgttagcatctgcggcttctgaagccatcagagatcctaaaaattctagttctcctgttcaaatagcttttaatcgttttatggcagaatctcttgtagatcttgaggaggttatggatacgattcaagagcaaattacattatacgatcattgggacaagtaccacgaacaatggataaagtttctgctacatactttgtatcttagaccagcatctgcaatttaa

SEQ ID NO: 352 - protein, 323 aa, Saccharomyces cerevisiae
MSGSFWTSTQRHHWQYTKASLAKERQKLWLLECQLFPQGLNIVMDSKQNGIEQSITKNIPITHRDLHYDKDYNLRIYCYFLIMKLGRRLNIRQYALATAHIYLSRFLIKASVREINLYMLVTTCVYLACKVEECPQYIRTLVSEARTLWPEFIPPDPTKVTEFEFYLLEELESYLIVHHPYQSLKQIVQVLKQPPFQITLSSDDLQNCWSLINDSYINDVHLLYPPHIIAVACLFITISIHGKPTKGSSLASAASEAIRDPKNSSSPVQIAFNRFMAESLVDLEEVMDTIQEQITLYDHWDKYHEQWIKFLLHTLYLRPASAI

SEQ ID NO: 353 - DNA, 4284 bp, Saccharomyces cerevisiae
atgaataacggttctggtcgatacttgctgactcccccagatgatcttcacccctatgtgccaagctcgaaacctcaggaacaagtataccctgatttcaagccttgggagcacactgcagcagaagatcaaatcctagcaaactttgtggctaagggcttttaccatacaccaatggtaaatttcgagtccatatctgcgagatcatctgttcatgaatcattagtcactcaatccaacattctttcccagcaattcgacaaaattatcaagattagagaagaccacattaataagatcccctcaaattccacgacgacattacacgggcctggttttcagttgcctaatagaataacccttactgatcatagaaaggaaacgtggttgcatgaattgagttcgtctcacacttcgctggtcaaaattggcaagtttatacctcacggcttgaaaagaaggcaagtcatcgagcagtgctatttaaaatttataccattgaaaagggcgatttggttgataaagtgctgctattttatcgaatggaaatcgaaccacaaaaagaagaggtcaaatgctgctggggcagatgatgccatttccatgcacctgctaaaggactggacggatacctttgtatacatcctggaaaagctcatctttgatatgacaaatcactataacgattctcaacaactgcgtacgtggaagaggcagatttcttattttttaaaacttttggggaattgctactcactaagattgatcaataaggaaatctttcatcattggcttgtagagtttataaataagatggaaaacttcgaatttttgccattatctttacatattttgatgattttttggaacgacatctgccaaattgatacaaatgctcctgttgcggctacaataacatcaagtcaaaaagagcccttctttctggtaacaaaaatcactgatatgctattgcacaaatattatattgtttccagcagcaaatcaatgataaatgacgagaactacatcatcaatgatataaagaaaaacaacaagataaagttgaatattctcaaaatattatccagtttaattttgaaaatttttcaagaacaatctttagaggtgtttatatttcccacatctaactgggaaatttacaagcccttactttttgaaatagtctcaaacgccgacactaatcaaaattctgatatgaagaaaaaattagagttaattagttacagaaacgagtcattgaagaataattcttctatacgaaacgtaataatgtctgccagcaacgcaaatgactttcaattaactatcgtcacctgtaaacaatttccaaaactatcatgcattcaattaaattgtatagatactcagttcaccaagctactggacgataaccctacagaattcgattggcccacttacgttgaccaaaatccccttacaatgcataaaattattcaattaattctctggtccatacatccatcaaggcaatttgatcactatgaatctaatcaactggtagcgaaattattactattgcgaataaattcaacagatgaggatttgcacgaattccagatagaagatgccatttggtcattggttttccaattagccaaaaatttttcggcccaaaagagggtggtatcatatatgatgccttctttgtatcgcctgcttaatatactaattacttatggcatcattaaggtccctacgtatatcagaaagctaatcagttccggcctactttatctccaagattccaatgataagtttgtgcatgtccagctgttaattaacttgaaaatttcaccgttgatgaaaagtcaatacaatatggtattgaggaacgttatggaatatgacgttaaattttatgaaatttttaatttcgaccaactcgtggaaatcacagaacaaatcaaaatgcgaatactctccaatgatataactaatttgcaactgtcgaaaactcctctgagcattaaaatcatggttgcagaatggtacttatcacatttatgttccggtattttatctagtgttaaccgcacagtgttgctaaaaatattcaagattttttgtatcgatctggaggttttccaccacttttttaagtggatcgagtttattgtctaccatcaattgctaagtgatatagaatctctggaggcattgatggacatcttgctatgctaccaaaaattgttctcacaattcattaatgaccatattctttttacgaagacgttcatattcatttacaagaaagttttgaaagaaaaagacgtgcctgcttataatgtgacttcatttatgccattctggaaattttttatgaaaaacttcccttttgttttaaaggtggataacgatttaaggattgagttacaatctgtttacaatgatgagaaattgaaaactgagaagctgaagaatgataaatcagaagtcttgaaggtgtattccatgatcaataattcaaaccaagctgttggacagacttggaattttcccgaggtgtttcaagtaaacatcaggtttctactacacaactccgagatcattgatacaaatacaagcaaacagttccagaaagcacgaaacaatgtcatgcttttgattgccactaacttgaaggagtacaataaatttatgtccattttcttgaaaaggaaagactttactaacaaaaatttaattcaattgatctctctaaaacttctaacttttgaagtgacgcagaatgtgttggggctcgagtatattattcgattattaccaataaacttggaaaataatgacggctcatatggtctgtttttgaagtatcataaagaacaattcataaagtcaaattttgagaaaattttacttacatgttatgaattagaaaaaaaatatcatggcaacgaatgtgaaataaattattatgagatcctattgaaaattttaataacttatgggtcatctcccaaattacttgcaacatctacaaaaatcattatgttgttattgaatgatagcgtggaaaactcatctaatattttggaggatattttgtactactcaacttgtccgtcggaaaccgatcttaacgatattccattgggtagtggacaaccagacaatgacactgttgtaaccaacgatgataaaagtgacgatgatgatcacacagtcgacgaaattgatcatgtagaatattacgttatgatggactttgccaatctttgggttttccaagcgtttacctgtttctgcatcaaaaaaatcatggagaataatgagccagcaatggcaatggaagacttgaagaacttcatattccaaattatcgaaataactaattctaatgatttatgttcacaaatatttgaccaactgaaggatatgcagaccattgagatgataacccaaatagtggagaaagatttctgcacttcttgtttgcaaaacaacaaccaaaagatagatgataattacatcgttgtggtgatcgagattataacgtcattatcgatgaggtttcaaagagaaacttctggtatgatagttatttccatggagaactatcatttactaataaagatcataagacaattaagtgaactgaacgaaggaaatttatctaagagagaaatccaaatagatgccgtcttgaaaatttttagctttcatcaggattccattttccaacgcatcatcgctgatttatcagctgataaacccacaagtccattcattgatagcatatgcaagctgtttgataaaatatcatttaatttaagattgaagctgttcttgtacgaaattttgtcttcattgaaatcattcgccatctattcatccacaattgatgccccagcattccacacaagcggtaaggtcgaactaccgaagaaattgctgaacttaccaccattccaagtgtcctctttcgttaaggaaacaaaacttcatagtggcgactacggggaagaagaagatgcagaccaagaagaatcgtttagtttaaatttaggaatcggcatagttgaaatagcgcacgaaaacgaacagaaatggctcatttatgacaagaaagatcataaatatgtctgcacattttccatggagccgtaccacttcatctccaactataataccaagtacacagatgacatggctacaggcagtaatgatacgactgcgtttaacgattcctgtgtaaacctgagtctttttgatgctcggtttgagaggaaaaatccacattga

SEQ ID NO: 354 - protein, 1427 aa, Saccharomyces cerevisiae
MNNGSGRYLLTPPDDLHPYVPSSKPQEQVYPDFKPWEHTAAEDQILANFVAKGFYHTPMVNFESISARSSVHESLVTQSNILSQQFDKIIKIREDHINKIPSNSTTTLHGPGFQLPNRITLTDHRKETWLHELSSSHTSLVKIGKFIPHGLKRRQVIEQCYLKFIPLKRAIWLIKCCYFIEWKSNHKKKRSNAAGADDAISMHLLKDWTDTFVYILEKLIFDMTNHYNDSQQLRTWKRQISYFLKLLGNCYSLRLINKEIFHHWLVEFINKMENFEFLPLSLHILMIFWNDICQIDTNAPVAATITSSQKEPFFLVTKITDMLLHKYYIVSSSKSMINDENYIINDIKKNNKIKLNILKILSSLILKIFQEQSLEVFIFPTSNWEIYKPLLFEIVSNADTNQNSDMKKKLELISYRNESLKNNSSIRNVIMSASNANDFQLTIVTCKQFPKLSCIQLNCIDTQFTKLLDDNPTEFDWPTYVDQNPLTMHKIIQLILWSIHPSRQFDHYESNQLVAKLLLLRINSTDEDLHEFQIEDAIWSLVFQLAKNFSAQKRVVSYMMPSLYRLLNILITYGIIKVPTYIRKLISSGLLYLQDSNDKFVHVQLLINLKISPLMKSQYNMVLRNVMEYDVKFYEIFNFDQLVEITEQIKMRILSNDITNLQLSKTPLSIKIMVAEWYLSHLCSGILSSVNRTVLLKIFKIFCIDLEVFHHFFKWIEFIVYHQLLSDIESLEALMDILLCYQKLFSQFINDHILFTKTFIFIYKKVLKEKDVPAYNVTSFMPFWKFFMKNFPFVLKVDNDLRIELQSVYNDEKLKTEKLKNDKSEVLKVYSMINNSNQAVGQTWNFPEVFQVNIRFLLHNSEIIDTNTSKQFQKARNNVMLLIATNLKEYNKFMSIFLKRKDFTNKNLIQLISLKLLTFEVTQNVLGLEYIIRLLPINLENNDGSYGLFLKYHKEQFIKSNFEKILLTCYELEKKYHGNECEINYYEILLKILITYGSSPKLLATSTKIIMLLLNDSVENSSNILEDILYYSTCPSETDLNDIPLGSGQPDNDTVVTNDDKSDDDDHTVDEIDHVEYYVMMDFANLWVFQAFTCFCIKKIMENNEPAMAMEDLKNFIFQIIEITNSNDLCSQIFDQLKDMQTIEMITQIVEKDFCTSCLQNNNQKIDDNYIVVVIEIITSLSMRFQRETSGMIVISMENYHLLIKIIRQLSELNEGNLSKREIQIDAVLKIFSFHQDSIFQRIIADLSADKPTSPFIDSICKLFDKISFNLRLKLFLYEILSSLKSFAIYSSTIDAPAFHTSGKVELPKKLLNLPPFQVSSFVKETKLHSGDYGEEEDADQEESFSLNLGIGIVEIAHENEQKWLIYDKKDHKYVCTFSMEPYHFISNYNTKYTDDMATGSNDTTAFNDSCVNLSLFDARFERKNPH

SEQ ID NO: 355 - DNA, 4263 bp, Saccharomyces cerevisiae
atgagttctgacgcttccacgtacagacttgaggatgttttatccagcttctatagagtggagaaaatcaaaaagatcaactatcatcagtacatttctaaagcccaaaacgatcaatggtctatccaaatggaattcatgctacggaagcaggatccaaagactctagttgcgctgctttcaagggatttatggtgtttcagtataaatgatgatccggtaccgacacctcctgcgatagaacataaaccagtgagcccagataaaatcggaactttcactgccgattattcaaagccaaacttaccgccacactatgctctttttttaaaagctttaagaaggaaaatttacattaatttggcattaggttcacacaataagctaatacaatttgggaatgcctgcatatcattaagcggagtgccaaattatctcgtacagctagaaccacacctttttgtaaacggagatctcacagtgtcgttatgtgccaagaacatgggattagtaccaatgaaggaggaaaatttggaagaatctttcctttcaaagcatgcgctttatttagcaccatctggaataaggatgcatttggcccctgcttccaagcaaggatacttgataacgccaccaaaacatacagaacttctcttgacgacgttaagtgtatctcatggtataaacttacaaaataaaaaaaatttgaaatgggttgctgttgttcctgacttaggacatctcaacggccacacacctactatagcttcgtatttaactcccttacttgaagcaaagaagctagtatggccgctgcatttaatcttcgcccaaccagtagctgatatagaaaattctacttccggagatccatcagaatttcactgtttgcaagatgctctggatgccattgatgatttcatacaattaaagcaaacagctgcctataggactccaggaagttccggcgtattgagcagtaatattgctggtacaaatcccttaagctcagatggagcatatacagaacagtttcaacattataagaacaactcaattagttctcaacccgcttcttatcattctgtccaagaaactaataagatatctccgaaagatttctcccctaatttcacaggcattgataaattaatgctgtcgcccagcgatcaatttgctccagctttcttaaatacccctaataataacatcaatgagaatgaattatttaatgataggaaacaaactacagtatcaaatgacttagagaacagcccactgaaaacggaactggaggcaaatggtagatcactcgaaaaggtaaataattccgtgagcaagacaggaagcgtagacacacttcataataaagagggaacactggaacaacgagaacagaacgaaaatctgccaagtgataaaagtgactctatggtagacaaggaattgtttggtgaggatgaggatgaggatttatttggcgatagcaataaatcgaattctacaaacgaatcgaacaaaagtatatcggacgaaattaccgaggatatgttcgaaatgtctgatgaagaagaaaataataacaataaaagcattaataaaaataacaaggaaatgcatactgatcttggtaaagatattccattttttccctcatctgaaaaaccgaatatccgtacgatgagcggaactacaaaaagattaaatggaaagaggaaatatttggatattccgatagatgaaatgaccttgccaacgagtccattatatatggacccaggtgcgccactccctgtggaaacaccccgcgatagacgcaaaagtgtgttcgctccactgaattttaaccccataatagaaaacaatgttgataacaaatacaaatctggagggaaattttccttcagtccgttgcaaaaggaggaagcattaaactttgatatttctatggcggatctttctagctctgaagaggaagaggatgaagaagagaacggtagcagcgatgaggatctaaagtcattgaacgtacgcgacgacatgaaaccttctgataacatcagtactaatactaatattcatgagcctcaatacataaattactcttcgatcccaagtctacaagactctattataaagcaagaaaatttcaattcagtaaacgatgctaatatcactagcaataaggaaggcttcaactctatttggaaaattcctcaaaatgatataccacagaccgagtcaccactgaagaccgttgattcatctattcaacccatagaatccaatataaagatgaccttggaagataataatgttaccagtaatccgtccgaatttacgccgaatatggtaaattctgaaatttctaacctaccaaaagacaagagtggtatccccgaattcacaccggcggaccccaatttatcttttgaatcatcaagtagtctaccgtttctattgagacacatgccgctagcatctataccggacattttcatcacgcctactcccgttgttacaatttcagaaaaagaacaagacatcttagatttaattgcagaacaagtcgtcactgattataatatcttaggaaacctcggtattccaaagatcgcctataggggagttaaagattgccaagaaggtttaataacaaccacaatgttacagttattttccactttcgatagattaaatggcaatgatacgatctccaaattctataacatgaagcagccgtacgtttttgtaaagaaacatcacgaactaatcaaagtcaaacacgactctcagccatttattaagttcctcaattttcgccctccaaatggaataaaaaacttcaaatccttattattaagttcatctttcaaagaagattgtctgtcatttgcgccaactctatctcaaacatatattaatcaagagttagggttttgtgagttgcttaaactaactaatgaagacccgcccggactgatgtacttgaaggcatttgataaaaacaagttactgttgttagctgcgcagattgtttcatactgttctaataataagaactccatcaaaaacgtgccaccaatattaataattttacccttggataatgcaactctgactgaattagtagacaaggcgaatatttttcaggtgatcaagaacgaagtttgtgccaagatgcctaacattgaactatatttgaaagttattcctatggatttcattagaaacgtactggtgacagtggatcagtacgtcaacgtagcaatttctatatataacatgctgccgccaaaatctgtaaagttcacccacattgcgcatacgctgccggagaaagtgaatttcagaaccatgcagcaacagcaaatgcaacagcaacagcaacagcaacagcagcagcagaataacagtacaggatcatcttctataatatattatgactcgtacatccacctggcatactcgcgtagtgtagataaagagtgggtttttgcagctctttcagatagctatggacaaggcagcatgacgaaaacgtggtacgtcgggaattccagaggaaaatttgacgacgcatgtaatcaaatatggaatatcgccctaaatttagcgtctaaaaaattcggaaaaatatgtctaattttaactagattgaatggcatactgccggatgatgaattgatgaattggaggagactttctggtaggaatatacatcttgctgtggtgtgtgtggatgacaactctaaaatctccttcatagatgaggacaaattgtaccctagtttcaagccgatctacaaagacactaggtttggaggacgcatggatatgaccagattatacgactatgaaataagggatatagaccaggacatccatggaatagtatttcagcacccgttcccactggcacactcacagcatcgctgtgctattaggagtggtgctttgatcaaattcaaaaaatgcgacggtgatacggtttgggacaaattcgcagtcaaccttttaaactgtccacattctgatagtacacaattgctggaaaccatcttagaagagtttcgcaacctggctgctctaaacgtgtggtacggtctctctgatggcgaagatggccatattccatggcatatcctagccgtgaaaaaaatgatgaacactcttgtgcacaccagagtaaaaattgctaatacttccgccgctactgtgcataccgctacttcttcatcaattattctctcggataaataa

SEQ ID NO: 356 - protein, 1420 aa, Saccharomyces cerevisiae
MSSDASTYRLEDVLSSFYRVEKIKKINYHQYISKAQNDQWSIQMEFMLRKQDPKTLVALLSRDLWCFSINDDPVPTPPAIEHKPVSPDKIGTFTADYSKPNLPPHYALFLKALRRKIYINLALGSHNKLIQFGNACISLSGVPNYLVQLEPHLFVNGDLTVSLCAKNMGLVPMKEENLEESFLSKHALYLAPSGIRMHLAPASKQGYLITPPKHTELLLTTLSVSHGINLQNKKNLKWVAVVPDLGHLNGHTPTIASYLTPLLEAKKLVWPLHLIFAQPVADIENSTSGDPSEFHCLQDALDAIDDFIQLKQTAAYRTPGSSGVLSSNIAGTNPLSSDGAYTEQFQHYKNNSISSQPASYHSVQETNKISPKDFSPNFTGIDKLMLSPSDQFAPAFLNTPNNNINENELFNDRKQTTVSNDLENSPLKTELEANGRSLEKVNNSVSKTGSVDTLHNKEGTLEQREQNENLPSDKSDSMVDKELFGEDEDEDLFGDSNKSNSTNESNKSISDEITEDMFEMSDEEENNNNKSINKNNKEMHTDLGKDIPFFPSSEKPNIRTMSGTTKRLNGKRKYLDIPIDEMTLPTSPLYMDPGAPLPVETPRDRRKSVFAPLNFNPIIENNVDNKYKSGGKFSFSPLQKEEALNFDISMADLSSSEEEEDEEENGSSDEDLKSLNVRDDMKPSDNISTNTNIHEPQYINYSSIPSLQDSIIKQENFNSVNDANITSNKEGFNSIWKIPQNDIPQTESPLKTVDSSIQPIESNIKMTLEDNNVTSNPSEFTPNMVNSEISNLPKDKSGIPEFTPADPNLSFESSSSLPFLLRHMPLASIPDIFITPTPVVTISEKEQDILDLIAEQVVTDYNILGNLGIPKIAYRGVKDCQEGLITTTMLQLFSTFDRLNGNDTISKFYNMKQPYVFVKKHHELIKVKHDSQPFIKFLNFRPPNGIKNFKSLLLSSSFKEDCLSFAPTLSQTYINQELGFCELLKLTNEDPPGLMYLKAFDKNKLLLLAAQIVSYCSNNKNSIKNVPPILIILPLDNATLTELVDKANIFQVIKNEVCAKMPNIELYLKVIPMDFIRNVLVTVDQYVNVAISIYNMLPPKSVKFTHIAHTLPEKVNFRTMQQQQMQQQQQQQQQQQNNSTGSSSIIYYDSYIHLAYSRSVDKEWVFAALSDSYGQGSMTKTWYVGNSRGKFDDACNQIWNIALNLASKKFGKICLILTRLNGILPDDELMNWRRLSGRNIHLAVVCVDDNSKISFIDEDKLYPSFKPIYKDTRFGGRMDMTRLYDYEIRDIDQDIHGIVFQHPFPLAHSQHRCAIRSGALIKFKKCDGDTVWDKFAVNLLNCPHSDSTQLLETILEEFRNLAALNVWYGLSDGEDGHIPWHILAVKKMMNTLVHTRVKIANTSAATVHTATSSSIILSDK

SEQ ID NO: 357 - DNA, 1650 bp, Aspergillus nidulans
atgttagcgtccatcccgcacatggagacgctgcgatccctccctcggaatcccgacgtcgttgcgcgacacccatcggcggaagacctagacgctgcccagcagcttatttcgtccgcccaagccggtcgagaacacccacaggatcgacattacacggataatggatctcggaagtctgaggcgggggctccgcacagtcatcatgagggagagtaccccatagttcagacctccgagactccaatgaacgggcatcatgttgaaaagacatctccgaaatcccaaaaggatacctcgttcctagggcattcttgcagtaattgtggaaccaagagtacccccttatggcggcggtctcctactggagctatgatttgtaatgcatgtggtctctacttgaaagcccgcaatgttgcaaggccgactaaaagaaaccgaacgcaagcaagtcccgaggcgtatcacccgcaaaaccaatccgttggttctcaacctgatcccgctgttactggaagcgaaggttgtactggttcttgcccgggtggtggaaactgcaatggcacaggtggtgcagaaggatgcgacggttgtcctgcctataacaaccgcgtttacaagtcgactgcacgaggaaacgtcgcggcgcatgcgctgaacagggcaggaaattcggatgctgttccgtctccagaggctgaagcacctgcaaggaatagtggacaaccagagggtaatatgctggtggcttgccaaaattgcggaactacagtgacgccgctctggcggcgtgacgagaacggccatccaatctgtaatgcatgcggtctctattataagcttcacggttcctatcgacctaccacgatgaagaagactattatcaaacggcgaaaacgggttgtgccggctctgcgagaaaattccccgactgctgctacccattcttcacacgggtcatctgcatcgccagaagcatcgtcaccagcaactctggcctattcacatgacgagcgccatcgatattacagttcagagcctgttgaccaataccaccggatttcaccggcggcacagaggccatttggattcgcaccaccgccggttgattttacaaatttcaattccggggctgtaacgctacctcaccacccgcctccgcctaggctcctcgagccaggccatccacctctttcccaattcgctcgacgatcaatctcaccgagctcgtcagggaactccaagaaacgaacacttgcagaggccggtgctaatacagacactggccccgttccaactacattagaggccgggtcgaatcaacttccacccattgtctcgtctgctaatccgccaccacccgctcgactaagttcaatatcctctatcctcaaccatgctcacgcccgcgacgaaagtcggttagacccctctcttgctgctttgggccgccaacagcaatctcaaccgcatcacccacaatcttcaccgcttgcacctacccaggcagcctcccagtcactacccggtgtatccaacatggataaccacgttgaagatcgccgcgcgaagctccagcgggaagcggaagagatgcgagaacaactccgagctaaagaaagggagttagcggagctggcgggtcaatga

SEQ ID NO: 358 - protein, 549 aa, Aspergillus nidulans
MLASIPHMETLRSLPRNPDVVARHPSAEDLDAAQQLISSAQAGREHPQDRHYTDNGSRKSEAGAPHSHHEGEYPIVQTSETPMNGHHVEKTSPKSQKDTSFLGHSCSNCGTKSTPLWRRSPTGAMICNACGLYLKARNVARPTKRNRTQASPEAYHPQNQSVGSQPDPAVTGSEGCTGSCPGGGNCNGTGGAEGCDGCPAYNNRVYKSTARGNVAAHALNRAGNSDAVPSPEAEAPARNSGQPEGNMLVACQNCGTTVTPLWRRDENGHPICNACGLYYKLHGSYRPTTMKKTIIKRRKRVVPALRENSPTAATHSSHGSSASPEASSPATLAYSHDERHRYYSSEPVDQYHRISPAAQRPFGFAPPPVDFTNFNSGAVTLPHHPPPPRLLEPGHPPLSQFARRSISPSSSGNSKKRTLAEAGANTDTGPVPTTLEAGSNQLPPIVSSANPPPPARLSSISSILNHAHARDESRLDPSLAALGRQQQSQPHHPQSSPLAPTQAASQSLPGVSNMDNHVEDRRAKLQREAEEMREQLRAKERELAELAGQ

SEQ ID NO: 359 - DNA, 1599 bp, Penicillium chrysogenum
atgttagcgtctctcccacaaatggaagcgcttcactctttacctcggaatcaagtcgttccaatgcgacaaccgtcagcggaagatttggatgctgcgcagcagttgatctcctcagcacaggcaggtcgtgaacatttagcagatcactaccgagaggatggcatggtacaaagatctggtcaacccggatcaaatcaatggaatggacacaatgaaaccccgagtgagaaaacatctcctagtagccaaaaggacacaaccttcctagggcattcatgcagcaattgcggcacaaaaagcactcctctctggcgtcgttctcctaccggagcgatgatctgcaacgcctgcggtctttatctcaaagctcgcaacgtcgctcgccccacgaaacggaatcggatgcaatcagagggtgctgagaagccgccaccacctgcgagctctcattgcggcggttcctcggaaggtggtggttgcaaggggtcatgccctggtggtggaagttgtaacggcactggtggtgcagaaggatgcgatgggtgtccggcatacaacaaccggatatacaagtctgctacccgaggtgcggctgccatccaatcttcctggggtcgtcaccaagcgcacgaacctgagcctgcgacgcaagaggagacaccggtgaaggcccctgctcctgccgatgcctctaacaccttggttgcttgtcaaaattgcggcacaaccgtgactcctctttggcggcgcgatgaacaaggccaccccatttgcaatgcttgtggattgtactataagctccacggatgctatcgccccaccaacatgaaaaagtctattataaaacgtcgcaagcgcgtggttcctgccctacgagatcagtctcccaccgctggtaccctttcttccaatggctcatcgacatccccggaagcatcacctgccgccctggcgcatggccatgatgatcactatcggtatatgagcagcgagcctggggatcactaccagatgatgcctgggaaaactgaagacgcacctcgagccctgccttttgcgccaccgccggttgatttcaccggttacaatgtttcatctgtgccccttgcacatggtccctccatcccccacggcctaccaaaacttttggaagtggagcggctgggacattcgcccgtgtctcagtacgggcgccggtccgtttctccaaacactctcaacgttcccaagaaacgaacattggccgaggctgcaacagaggctctaccagccccatctacgttggaggcaggctcaaatcaactgcctccgattatgtcttcggccaatcctactccacctgggcgtctcagctcaatctcgtccatcttaaaccaatcagatgttcggggcgagcctcgctcggataataacctgggacgtccacctcccatccaccactctgtctccccttcgcctcacccgccgcagcctttgcctggtcttgcatctcttggagactcggttgatcgccgtgcccgacttgaacgcgaagcggagcagatgcgcgagatgctcagagcaaaggagcgcgagctggcagagatgagacgatag

SEQ ID NO: 360 - protein, 532 aa, Penicillium chrysogenum
MLASLPQMEALHSLPRNQVVPMRQPSAEDLDAAQQLISSAQAGREHLADHYREDGMVQRSGQPGSNQWNGHNETPSEKTSPSSQKDTTFLGHSCSNCGTKSTPLWRRSPTGAMICNACGLYLKARNVARPTKRNRMQSEGAEKPPPPASSHCGGSSEGGGCKGSCPGGGSCNGTGGAEGCDGCPAYNNRIYKSATRGAAAIQSSWGRHQAHEPEPATQEETPVKAPAPADASNTLVACQNCGTTVTPLWRRDEQGHPICNACGLYYKLHGCYRPTNMKKSIIKRRKRVVPALRDQSPTAGTLSSNGSSTSPEASPAALAHGHDDHYRYMSSEPGDHYQMMPGKTEDAPRALPFAPPPVDFTGYNVSSVPLAHGPSIPHGLPKLLEVERLGHSPVSQYGRRSVSPNTLNVPKKRTLAEAATEALPAPSTLEAGSNQLPPIMSSANPTPPGRLSSISSILNQSDVRGEPRSDNNLGRPPPIHHSVSPSPHPPQPLPGLASLGDSVDRRARLEREAEQMREMLRAKERELAEMRR

SEQ ID NO: 361 - DNA, 1581 bp, Saccharomyces cerevisiae
atgcctgactctaagtacacaatgcaaggttataaccttgttaagctattaaaaaggctagaagaagccactgcaagattagaggatgtcaccatctatcaagaaggttatattcagaataaattggaggcatctaaaaataacaagccttccgactccggggccgatgcgaatactacgaatgaaccttctgcagaaaatgctcctgaagtagaacaagatccgaaatgcataactgcgttccaatcttacatcggtgagaatattgatccgctggtagaattatcaggaaagatcgacacggtggtcttagatgctttgcagttgctaaagggaggctttcaatcgcaattgacttttttaagagctgctgtgagatcaagaaaaccggattattcttctcaaactttcgctgattctttaagacctatcaacgaaaatattataaagctgggtcaattgaaggaatcaaaccgtcaaagcaaatacttcgcatatttgagcgctttatctgagggtgctcctttgttctcctgggttgcagtggacactcccgtgtctatggtcacagatttcaaggacgcagcacagttttggactaatagaattttgaaagaatacagagagtctgatcctaatgctgttgaatgggttaagaaatttttggcctctttcgataatttgaaagcctacattaaagagtatcatactactggggtttcctggaaaaaagacggtatggattttgctgacgcgatggcacaatcaacgaagaatacaggtgctacttcatctccttcgccagcaagtgctacagcggctccagcaccaccacctcctccaccagccccaccagcttccgtctttgaaatctctaatgatacaccagcaacgagtagtgatgctaacaaaggcggtattggcgcggtcttcgccgaactaaatcagggtgaaaatatcactaagggtttgaaaaaagtagacaaatcccaacaaactcacaaaaatcctgaattacgtcaatcctctacagtttcttccacaggaagtaaatccggtccaccaccaaggccaaaaaagccatcaacattgaaaactaagaggcctcctagaaaggaattggtaggaaacaaatggtttattgagaattacgaaaatgaaactgaatctctggttattgatgcaaataaagatgagtctatcttcataggtaaatgttctcaagttcttgttcaaataaaaggaaaagttaacgctatctcgttgagtgaaactgagtcatgcagtgttgttcttgattctagcatttccggtatggatgtcatcaaatccaacaagtttggcattcaagttaaccattccctacctcaaatctccattgataaatctgacggcggtaacatctatttatccaaggaatccttgaatactgaaatctacacctcgtgctcaactgctattaacgtcaacttaccaatcggcgaggacgatgattacgtagaattcccaatccctgaacagatgaagcatagcttcgctgatggtaagttcaaatctgctgttttcgaacatgctggttaa

SEQ ID NO: 362 - protein, 526 aa, Saccharomyces cerevisiae
MPDSKYTMQGYNLVKLLKRLEEATARLEDVTIYQEGYIQNKLEASKNNKPSDSGADANTTNEPSAENAPEVEQDPKCITAFQSYIGENIDPLVELSGKIDTVVLDALQLLKGGFQSQLTFLRAAVRSRKPDYSSQTFADSLRPINENIIKLGQLKESNRQSKYFAYLSALSEGAPLFSWVAVDTPVSMVTDFKDAAQFWTNRILKEYRESDPNAVEWVKKFLASFDNLKAYIKEYHTTGVSWKKDGMDFADAMAQSTKNTGATSSPSPASATAAPAPPPPPPAPPASVFEISNDTPATSSDANKGGIGAVFAELNQGENITKGLKKVDKSQQTHKNPELRQSSTVSSTGSKSGPPPRPKKPSTLKTKRPPRKELVGNKWFIENYENETESLVIDANKDESIFIGKCSQVLVQIKGKVNAISLSETESCSVVLDSSISGMDVIKSNKFGIQVNHSLPQISIDKSDGGNIYLSKESLNTEIYTSCSTAINVNLPIGEDDDYVEFPIPEQMKHSFADGKFKSAVFEHAG

SEQ ID NO: 363 - DNA, 3753 bp, Saccharomyces cerevisiae
atgtctaaaaatagcaacgttaacaacaatagatcccaagagccaaataacatgtttgtgcaaaccacaggaggtggtaaaaacgccccaaagcagattcatgttgcacacagacgttcccaaagtgagttgacaaatttgatgattgaacaattcactttgcagaagcagttggagcaagttcaagcacagcagcaacagttgatggctcagcaacagcaattggcacaacagacaggacaatacctgtcaggaaattctggctctaacaatcatttcacgcctcaaccgcctcaccctcattacaactcaaacggtaattcacctggtatgagtgcaggtggcagcagaagtagaactcactccaggaacaactccggatattatcataattcatatgataacaataacaatagcaataatcctgggtctaactcacacagaaagacgagttcacaatccagcatatatggccattccagaagacattctttaggtctaaatgaagcgaaaaaggctgctgcggaagaacaagctaaaagaatatctgggggtgaagcaggcgtaactgtgaagatagattctgttcaagctgatagtggctcaaattctactacagaacaatctgattttaaatttccaccaccaccaaatgctcatcagggccatcgtcgcgcaacttcaaacctatcacctccctctttcaaatttcctccaaactctcacggggataatgacgatgaattcatagcaacctcttcaacgcaccgccgttcaaagacaagaaacaatgaatattctccaggcattaattccaactggagaaaccaatcacagcaacctcaacagcagctttctccattccgccacagaggatctaattcaagggattacaattccttcaataccttagaacctcctgcgatatttcagcagggacacaaacatcgtgcctctaattcatcagttcatagtttcagttcacaaggtaataataacggaggtggacgtaagtccctatttgcaccctaccttccccaagccaacattccagagctaatccaagaagggagactagtagctggtatattaagagttaataaaaagaatagatcggatgcctgggtctctacagatggcgctcttgatgcggatatttacatttgcggctccaaagatcgtaatagagcacttgaaggtgatttagtcgcggtagaactattagttgtggacgatgtttgggagtccaagaaagaaaaggaagaaaagaagaggagaaaggatgcctctatgcaacacgatctaattcctttgaacagtagtgacgattaccacaacgatgcatctgttactgctgcaacaagcaacaattttctatcttctccctcctcgtctgattcgctaagcaaggatgatttatccgtcagaagaaagaggtcatctactatcaataatgatagtgattccttatcatctcctaccaaatcaggagtaaggagaagaagttcattgaaacaacgtccaactcaaaagaaaaatgacgatgttgaagttgaaggtcagtcattgttattagttgaagaagaagaaatcaacgataaatataagccactttacgcaggccatgtcgttgctgttttggaccgtatccctggtcagttatttagcggtacattaggtttgttgagaccatcccaacaagctaatagcgacaataacaaaccaccacaaagcccaaaaattgcttggttcaagcctactgataagaaggtgccattaattgcaattcctacagaattagctccaaaggactttgttgaaaacgctgataaatactccgaaaagttattcgttgcctctattaaacgttggccaatcacatctttgcatccatttggtattttagtttccgaacttggagatattcacgatcctgatactgaaattgattccattttaagggataacaattttctttcgaatgaatatttggatcaaaaaaatccgcaaaaagaaaaaccaagttttcagccgctaccattaacggctgaaagtctagaatataggaggaattttacggacactaatgagtacaatatctttgcaatttccgagcttggatgggtgtctgaatttgccttacatgtcaggaataacggaaatggtaccctagagctgggttgtcatgttgttgatgtgaccagccatattgaagaaggctcctctgttgataggcgtgcgagaaagaggtcctctgcggtgttcatgccacaaaaacttgtcaatttattaccacaatcgttcaacgacgaactgtcgttggcccctggcaaggaatcagccacgctgtcggttgtttacactctagactcatctactttaaggattaaatctacttgggtaggcgaatctacaatttccccctcaaacatcttgtctttagaacaattagacgaaaaattatctactggaagtcccactagctacctctctactgtacaggaaattgctagatcattttatgctagaagaataaatgatccagaagctacattacttcccaccctgtccttattggaaagcttggatgacgaaaaagttaaggttgacttgaacatcctggatagaactttaggctttgttgtaattaatgagattaaaagaaaggtcaactccactgttgcagagaaaatttacaccaaacttggtgatctagctcttttgagaaggcagatgcaacccattgcaaccaagatggcgtcatttagaaagaaaattcaaaattttggttacaattttgataccaatacggcggatgaattaatcaaaggggtgctaaaaattaaagatgacgatgttagagtcggaattgaaattttactgtttaaaaccatgccaagagctagatactttattgctggcaaagtagacccggaccaatatgggcattatgccttgaacctacctatctacacacatttcacagcgccaatgagaagatacgctgatcatgtcgttcataggcaattaaaggccgttatccacgatactccatacaccgaagatatggaagctttgaagattacctccgaatattgtaattttaaaaaggactgtgcttatcaagcacaggaacaagcaattcatctattgttgtgtaaaacaatcaacgacatgggaaatactacaggacaattattaacaatggctactgtcttacaagtttacgagtcctcctttgatgtatttattccagaatttggtattgaaaagagagttcatggagatcaactacctttgatcaaagctgagtttgatggtaccaatcgtgtcttggaattgcattggcagcccggcgtagatagtgcaacttttataccagcagatgaaaaaaatccaaaatcctatagaaattccattaagaacaaattcagatccacagccgctgagattgcgaatattgaactagataaagaagcggaatctgaaccattgatcagcgatccattgagtaaggaactcagcgatttgcatctaacagtaccaaatttaaggctaccatctgcaagcgacaacaagcaaaatgctttagaaaaattcatttctactactgaaaccagaattgaaaatgataactatatacaagaaatacatgaattgcaaaagattcctattctattgagagctgaggtggggatggctttgccatgtttaaccgtccgtgcattaaatccattcatgaagagggtataa

SEQ ID NO: 364 - protein, 1250 aa, Saccharomyces cerevisiae
MSKNSNVNNNRSQEPNNMFVQTTGGGKNAPKQIHVAHRRSQSELTNLMIEQFTLQKQLEQVQAQQQQLMAQQQQLAQQTGQYLSGNSGSNNHFTPQPPHPHYNSNGNSPGMSAGGSRSRTHSRNNSGYYHNSYDNNNNSNNPGSNSHRKTSSQSSIYGHSRRHSLGLNEAKKAAAEEQAKRISGGEAGVTVKIDSVQADSGSNSTTEQSDFKFPPPPNAHQGHRRATSNLSPPSFKFPPNSHGDNDDEFIATSSTHRRSKTRNNEYSPGINSNWRNQSQQPQQQLSPFRHRGSNSRDYNSFNTLEPPAIFQQGHKHRASNSSVHSFSSQGNNNGGGRKSLFAPYLPQANIPELIQEGRLVAGILRVNKKNRSDAWVSTDGALDADIYICGSKDRNRALEGDLVAVELLVVDDVWESKKEKEEKKRRKDASMQHDLIPLNSSDDYHNDASVTAATSNNFLSSPSSSDSLSKDDLSVRRKRSSTINNDSDSLSSPTKSGVRRRSSLKQRPTQKKNDDVEVEGQSLLLVEEEEINDKYKPLYAGHVVAVLDRIPGQLFSGTLGLLRPSQQANSDNNKPPQSPKIAWFKPTDKKVPLIAIPTELAPKDFVENADKYSEKLFVASIKRWPITSLHPFGILVSELGDIHDPDTEIDSILRDNNFLSNEYLDQKNPQKEKPSFQPLPLTAESLEYRRNFTDTNEYNIFAISELGWVSEFALHVRNNGNGTLELGCHVVDVTSHIEEGSSVDRRARKRSSAVFMPQKLVNLLPQSFNDELSLAPGKESATLSVVYTLDSSTLRIKSTWVGESTISPSNILSLEQLDEKLSTGSPTSYLSTVQEIARSFYARRINDPEATLLPTLSLLESLDDEKVKVDLNILDRTLGFVVINEIKRKVNSTVAEKIYTKLGDLALLRRQMQPIATKMASFRKKIQNFGYNFDTNTADELIKGVLKIKDDDVRVGIEILLFKTMPRARYFIAGKVDPDQYGHYALNLPIYTHFTAPMRRYADHVVHRQLKAVIHDTPYTEDMEALKITSEYCNFKKDCAYQAQEQAIHLLLCKTINDMGNTTGQLLTMATVLQVYESSFDVFIPEFGIEKRVHGDQLPLIKAEFDGTNRVLELHWQPGVDSATFIPADEKNPKSYRNSIKNKFRSTAAEIANIELDKEAESEPLISDPLSKELSDLHLTVPNLRLPSASDNKQNALEKFISTTETRIENDNYIQEIHELQKIPILLRAEVGMALPCLTVRALNPFMKRV

SEQ ID NO: 365 - DNA, 2139 bp, Saccharomyces cerevisiae
atgctcaattctgcgttactgtggaaggtttggctacgaatagacaactccactgatgaagtaaaccaaccaattgctgtacagttcgatgaaatagatactgttgatgatttgaagagcaggttttttcagaaactgagttcgactcgatggcgagaaattaacgataatgcttccattgcaataggcctctacgcacctaaatttgacaatcaagccgacaataccagtagtaacaacactaacgataatagttgtcgaagtaagagtaacggtgctggaagtggcgccaacctttccgttaatagcaataccaagagttcagtgagccccacagcaggatcatttggtctttcaaaagaccttgcaaaggacaggaatgttctccagcatcctaaacctacgcagaaaagaggagcattatacgacgcctttgccgccgtgccgacagtggccgcgactaccaatgtggattttcctcccaacgaggcgccaatgctaagcccgcaaagaccatactctactagtcctaaacagtttccagcaacaactaaaagtccgttactgcgatttgcctcagtctcaccctaccctaaatttcattctgataatcaaattatggcatcagctggtcttacatacgtctcaccgcataataaaaataaatacacaaggccgttgattagaaaaggtttaaattttaccacagaatcagttaatgattgcacttataaaatcatctttgaaccggatgaattggctattaacatatataaggaactattcggaaccatgggttcccaacctgcatcgcagcctttgctgatattttcgaatgttaatttacgccaggatgtaccgcctttagatatcttaaatgttgtagactatgttcctacgaatgaagaaatttcgcagcagaaaactcaaccaacagaccatggggccgttggtgtttttcatctagacgaccatatttctccgggcgaacaaggtcttaagcaaacaattggtgataaagcagatcttaaaggtaaagatggcaatagcagccctcaggaatttaaattaataactgatgaagagcaattgagaagagcgtcacaagaactgaaggatgaggaaaaggatgccgagtctccttggcaagcaatcttgctgttaccaaaaggttataaaggaggggtagattttcgaaataaaccagtggcccacacggattcatctttcaataatgaagacacaattactcattcagagttagaagtgaacaccggatccccttcgcaagaaagcggatcacttaatgaagctggtataggcataacgcaacccatgtcggaagtacaaagaagaaaagaagacgttacgcccgcatcaccaatattaacaagtagtcaaacgccgcattactcaaactcgctttataacgcaccttttgctgtttcctctccaccagatcctttaccaaacctttttaccaccacaagtgaaaaagttttccccaaaattaatgttttaatagttgaagacaacgtcatcaaccaagctatcttaggttcctttctgaggaaacacaaaatctcatataaactggctaaaaatggtcaagaagctgttaatatttggaaggaaggcggtcttcatttaatatttatggatttacagctgcctgtcttgtctggtatagaagctgccaagcagattagggacttcgaaaaacaaaatggcattggcattcaaaaaagtctcaataactcacactccaatcttgaaaaaggtacttcaaagagattctctcaggcgcccgtgattattgtagcattgaccgcatctaactctcagatggataaaagaaaagcacttctttctggttgtaacgactacctgactaaaccagtgaatttacactggcttagtaagaaaattacagagtggggatgtatgcaagccttgattgattttgacagctggaagcagggagaaagccggatgaccgacagtgttttggttaaatctccacagaaacctattgcaccttccaaccctcactcattcaaacaagcgacatctatgacccctacacacagcccagtaagaaaaaattcaaacctctcgcccactcaaatagaattgtga

SEQ ID NO: 366 - protein, 712 aa, Saccharomyces cerevisiae
MLNSALLWKVWLRIDNSTDEVNQPIAVQFDEIDTVDDLKSRFFQKLSSTRWREINDNASIAIGLYAPKFDNQADNTSSNNTNDNSCRSKSNGAGSGANLSVNSNTKSSVSPTAGSFGLSKDLAKDRNVLQHPKPTQKRGALYDAFAAVPTVAATTNVDFPPNEAPMLSPQRPYSTSPKQFPATTKSPLLRFASVSPYPKFHSDNQIMASAGLTYVSPHNKNKYTRPLIRKGLNFTTESVNDCTYKIIFEPDELAINIYKELFGTMGSQPASQPLLIFSNVNLRQDVPPLDILNVVDYVPTNEEISQQKTQPTDHGAVGVFHLDDHISPGEQGLKQTIGDKADLKGKDGNSSPQEFKLITDEEQLRRASQELKDEEKDAESPWQAILLLPKGYKGGVDFRNKPVAHTDSSFNNEDTITHSELEVNTGSPSQESGSLNEAGIGITQPMSEVQRRKEDVTPASPILTSSQTPHYSNSLYNAPFAVSSPPDPLPNLFTTTSEKVFPKINVLIVEDNVINQAILGSFLRKHKISYKLAKNGQEAVNIWKEGGLHLIFMDLQLPVLSGIEAAKQIRDFEKQNGIGIQKSLNNSHSNLEKGTSKRFSQAPVIIVALTASNSQMDKRKALLSGCNDYLTKPVNLHWLSKKITEWGCMQALIDFDSWKQGESRMTDSVLVKSPQKPIAPSNPHSFKQATSMTPTHSPVRKNSNLSPTQIEL

SEQ ID NO: 367 - DNA, 4740 bp, Saccharomyces cerevisiae
atgtcgcattcagactacttcaattataagccttacggcgattccacggaaaagcccagcagctccaagatgaggcagtcatcttcatcatcttcatctagactaaggtcggaaagtttagggcgaaattccaatactacgcaggctcgagtagcgtcatcgcccatcagcccagggctgcattctacccagtactttagatcaccaaacgctgtttacagccctggagagtctccattaaatacagtacagctattcaatcgtcttccgggtatacctcaaggtcagttttttcatcaaaatgccatttctgggtcctccagctcctcggcaagatctagtagacggccctcgaatattggtcttcctctaccaaaaaatcctcagcagtctctaccgaagttgtctactcaacctgttcctgtacataagaaagttgaggctagtaaaacagagagcgagattattaagaagcccgctcccgtgaatagtaatcaagatccattattgacgaccccaacgttagtgatatcaccagaactggcttcactaaatacaacgaatacatcgattatgtcaacgccacaaaatattacaaaccaaacttcgaacaaacacattcccaccagatcgcaaccaaatgggtcaacaagttcctccactttgcaggatattgtcacgacaaatagctcgcaacggtctgtaggccaccatggtggaagcacaacgagcctccgaacatacaaaaaacaatatgtattaaatgaacagttatatttaagaaaaatgagaaaccgtgctaatgatgattattacactagaggtatagtcgcatcatccaactttgaagatgacgaagaaaattttagtaacaaaggtgaagatgacttagaactagaaatggatgatcttttaaaggtagaaggtgaggataaagataacgacttcaattttggttataattttattacgtcgagcacaaaaaataatgaaaatgttgtttcgatgagcctaaattatctaaagggcaaattggattggttgagggatgtgaacaatgatcaaccgtgtgaaatagaagatgaggagtggcattccatactggggagcgaggatttgctgtcaaaattgttacaaaatcctatggtgaacaaccgatttgaatggcaaacaatgttatctaaggtactgaagggagatattgtgaggaatgaaaaaacgaagattgcaaatcaagggaaaggccctggcttcaatactcagttttcagatgacatttggattgagttgaaggcatggatgaatgggaggaccgtggaagatcagaacaaatctctgaggatttttagggattctactgactccgtatttcaagaaatcatggcctttaaactagaagataatatgagcgctgacgaggctgcagagactatcaaatcactagtagacaaatattatagagtcttaaatctatggcctaacattaaaagaatgcatgctgaaaaacccattactaaaacagaagcattcaggaatcgaatagatactttgaatagttggcttaatttcaaatttaactttgatactaatattgcgtacctgaaaaaatggatagttggcaataaagagctagaaagcactaccgaagtggataacaccaccgtgaatttggatgatccagccgttttcgccactaattgtaaacgctttgcggagcaaattatgaaggaaaaggatattgaactgatatttcaaaaaaaaatattctttccattagcaccatggattttgaaggccaaatttttcttcttgaaataccaaaaaacttggaatgaattgaatctatcttatttggatcaagatctggaatttttattgatgtttccaatgcgtttggtaaaagatataatactaattcgcctatcttacgcgaagaaaatacagaatccaaccttgatgatgatcgatcaaatgatggacgattttagtacatatattaagttggcagtccaaatgaaattcactgttgcttcttactgtaatgactggttttttaaagtgaaaatcgatcccgaatttgatcataccgttgttgaaggattggaatattttttctccattttggaactgagaatattatatagtggcaaaaactcattcaagacttctaaagaacctgatctgttattaaaatattgggaaatgtttagaaacgtcggctattatattgatgatgcaggcgaactgatcgcagcagaatttacgaagttgacacttagattggttcacagattgcacgcttaccttttaaggcagcaaaacactccgccaaaattagagaatgaagctgctgctgaaaaatggctggtgcaaatattcgaaatacttggatccatgaaaagaaaactcaatagattcaccaatattttgacaaaagcatttcaaaattttgtccgctacaagatagaagatcacaactatctgctaaagcaactaaaagaaacaggccactttcttatatacacaggaggttacctagagcaaaatggtacttatttaattggtagcccagagctattaggctgtaaagatgatgatattttaagaatcattaagaattcagacatcggttgtgatttagtgcctaagctagaaattaataacagtctgacaatttataatgctttggatgataattggaactccaactcatcactgggttcagatatctcgaatgatggtaccccattttattatatcaaaaacgatttgaccacccagcctagatcttataacggtaatagagtcaatcgtgaaccggattttgaaaacagcaggagcacggaggaagagttttatgaactggagacaagattgaactctcttggttatgtattggtattgactccgcaagagccattactttgggagggtgagatgtataatctatccgataacaaaacaattaaaccagagggattgaacttgaaagtaattcctaattcaatagatttgatgtgccaaggatccagttatgccttagaataccaatgtgacaggttccaacagatatctggtagctcagtttctttcttggaaaaaaaatcttcctcagaaacggttaaaaacaacttacaaaggataaataaagcatatttcagatgcacgtacagtgttctgaagaactatacaaagattgtgaccacgttcaagaaggtaagtcctgtcaatgatttattgaataatattttcctttttgggagggattttggtctgaactttttgagaattaatgttgccaacaatgaaaaaagatccattataatacttttaatgatgcggttaagtatcggatggctgaagttcttagctgaagactgtgatccgactgatcaaagggtatttaggtggtgtgtcacgtcaatggagttcgcgatgcatatggtaagcggttggaacatactagctcttgatgaatgccaattttcttctttaaaacaaaaaatttcagaatgcatgtcattacttatttctcattttgatataataggcgcacgctccatagaagttgagaaaatcaatcaacaagctagatcaaatcttgatttggaagatgtgtttgacgatgatatgatgctacaagtgaattccgagttccgagtacaaagtataatggaattggaagaaaggataaagcggaatcctcatcaaactggtaaagtaattgatgatagtgacaaaggtaacaagtaccttgtttctttggcatcttccatatcgaacgtttctatgagatggcaaaagaggaactttattggtggcggtacttttggaagggtatattctgctgttgatttggataatggtgagattttagcagtcaaggaaatcaatattcaagatagcaaatcaatgcaaaaaatattccccttaatcaaggaggaaatgagtgtcttagagatattgaaccatccaaatatagtttcatattacggtgttgaagttcatcgtgataaagttaacatctttatggaatattgtgaaggcggttccctagcagctcttttggagcatggtcgtattgaagatgaaatggtcactcaagtctacactttacaattgctagaaggacttgcatatttgcatgaatccggcattgttcaccgtgatgttaaacccgaaaacatcctactagattttaatggtgttattaagtatgttgattttggtgctgctaaaaaaattgctaataatggaactagattggcaagtatgaacaaaatcgaaaacgcagatggtgaacacgaagatgttacccatgtttctgattcaaaggcagtgaaaaataacgaaaatgctctattagacatgatgggaactcctatgtacatggctccagaatccatcactggatctaccaccaaaggcaaacttggggcagacgatgtttggtcgttaggctgcgtggtattagaaatgatcactggtagacggccatgggctaacttagataatgaatgggctatcatgtaccatgttgctgcaggacataccccacaattccctactaaggatgaagtgtcgtctgctggtatgaaatttctggaaagatgtcttattcaaaacccctccaagagagccagtgcggttgagctgttgatggatccttggattgtacaaattagagaaatagcctttggcgacgattcttcctctacagatactgaggaaagagagtag

SEQ ID NO: 368 - protein, 1579 aa, Saccharomyces cerevisiae
MSHSDYFNYKPYGDSTEKPSSSKMRQSSSSSSSRLRSESLGRNSNTTQARVASSPISPGLHSTQYFRSPNAVYSPGESPLNTVQLFNRLPGIPQGQFFHQNAISGSSSSSARSSRRPSNIGLPLPKNPQQSLPKLSTQPVPVHKKVEASKTESEIIKKPAPVNSNQDPLLTTPTLVISPELASLNTTNTSIMSTPQNITNQTSNKHIPTRSQPNGSTSSSTLQDIVTTNSSQRSVGHHGGSTTSLRTYKKQYVLNEQLYLRKMRNRANDDYYTRGIVASSNFEDDEENFSNKGEDDLELEMDDLLKVEGEDKDNDFNFGYNFITSSTKNNENVVSMSLNYLKGKLDWLRDVNNDQPCEIEDEEWHSILGSEDLLSKLLQNPMVNNRFEWQTMLSKVLKGDIVRNEKTKIANQGKGPGFNTQFSDDIWIELKAWMNGRTVEDQNKSLRIFRDSTDSVFQEIMAFKLEDNMSADEAAETIKSLVDKYYRVLNLWPNIKRMHAEKPITKTEAFRNRIDTLNSWLNFKFNFDTNIAYLKKWIVGNKELESTTEVDNTTVNLDDPAVFATNCKRFAEQIMKEKDIELIFQKKIFFPLAPWILKAKFFFLKYQKTWNELNLSYLDQDLEFLLMFPMRLVKDIILIRLSYAKKIQNPTLMMIDQMMDDFSTYIKLAVQMKFTVASYCNDWFFKVKIDPEFDHTVVEGLEYFFSILELRILYSGKNSFKTSKEPDLLLKYWEMFRNVGYYIDDAGELIAAEFTKLTLRLVHRLHAYLLRQQNTPPKLENEAAAEKWLVQIFEILGSMKRKLNRFTNILTKAFQNFVRYKIEDHNYLLKQLKETGHFLIYTGGYLEQNGTYLIGSPELLGCKDDDILRIIKNSDIGCDLVPKLEINNSLTIYNALDDNWNSNSSLGSDISNDGTPFYYIKNDLTTQPRSYNGNRVNREPDFENSRSTEEEFYELETRLNSLGYVLVLTPQEPLLWEGEMYNLSDNKTIKPEGLNLKVIPNSIDLMCQGSSYALEYQCDRFQQISGSSVSFLEKKSSSETVKNNLQRINKAYFRCTYSVLKNYTKIVTTFKKVSPVNDLLNNIFLFGRDFGLNFLRINVANNEKRSIIILLMMRLSIGWLKFLAEDCDPTDQRVFRWCVTSMEFAMHMVSGWNILALDECQFSSLKQKISECMSLLISHFDIIGARSIEVEKINQQARSNLDLEDVFDDDMMLQVNSEFRVQSIMELEERIKRNPHQTGKVIDDSDKGNKYLVSLASSISNVSMRWQKRNFIGGGTFGRVYSAVDLDNGEILAVKEINIQDSKSMQKIFPLIKEEMSVLEILNHPNIVSYYGVEVHRDKVNIFMEYCEGGSLAALLEHGRIEDEMVTQVYTLQLLEGLAYLHESGIVHRDVKPENILLDFNGVIKYVDFGAAKKIANNGTRLASMNKIENADGEHEDVTHVSDSKAVKNNENALLDMMGTPMYMAPESITGSTTKGKLGADDVWSLGCVVLEMITGRRPWANLDNEWAIMYHVAAGHTPQFPTKDEVSSAGMKFLERCLIQNPSKRASAVELLMDPWIVQIREIAFGDDSSSTDTEERE

SEQ ID NO: 369 - DNA, 3996 bp, Saccharomyces cerevisiae
atgatgatggatatactgaatacacagcaacaaaaagcggctgaaggcgggagagttctggctcctcataccatctcaagtaagctcgtgaagagattatcaagtcattccagccataaactatcaagatctgatttgaaagcattgggtggctcggaaacaataagcgacggccccagtcagctgacttttaaggaccgatacgttttcaatgaatcgctatacttgaaaaagctaaaaaagaccgctttagatgactactacacgaggggcataaaactcactaaccgctacgaggaagacgacggtgatgacgaaattattcggttgtctaatggcgacagaattgatgaagacctgcactcaggtgtcaagtttttctccactacaccttattgcaggaaaatgaggtcagacagtgatgaactagcttggaatgaaattgcgaccgaacggttcaaatggcagtcaatgctggccagagtgctgaagggagatattgttaaaggtgaaaagacgaggattgctaaccaagtcaagaaaccagggttaaataaggagctctcagatgagatatggctcgaattgaaggcatggctgaatgggaggaccatgcaagagatggaacagtcgcttacatatttaagagatagttcagattccgtttttgaagagataatgaagtttcaaattccacagggcaagatattgagcctggatgcactggaggccatcttacaagacctcatgaacagatatcacagcgttgtctcttattggcctaacttgaaaaaaatgtataaggataaaccaatcaccaatactgcagaatttaccgctagaatagacgtaatgaattcttggctgaactttaaaacgaacttaacgttgaggaggcaagagttggacgactggataaaccgtttctcaccgataagtagttcggataattgccaagaggattttgatggtgtgccccaatggaactgcaaaatgaagattcttgcagaacaattgatgaaggaaaagaacatcgagtctatattccaaaaaaaaattttctatccgctatcaccttggatgttcaaactgaaactacattttatagtctacagagaaactttgacaaagatgaacataaaatatccttatgaaaggttaagatcactactggcgttccccgtctatttaatcaaagaagttattttgactagattgtcatatgcacgaaagcttaaaaatccaacaatgatgatgatcgatcaaatgatcgatgattttaacgcttttattcgactttctgtgcaattgaagtacacactgacaaaatattgctccaatttgccgttcgatgtggattttgacccgacgttcgaaaatactgtaatagaagccattcgttatttattttttctgttgaatttaaagttgattgattccagtaaacaaaatttcaaagcacccgatctactcttgaaatactgggatcacctaaaaaacaccggtcactatattaacggtgcagaaaccgtgattccaaatgaatttctcaagttaactttgagactcgtacataaattgcaattctatcttttgaaacaacaaaacttcccaccaacatttgctaacgcttcagaagcagaaaaatggctaagttccattttcgaaaatttgggtgccatgaaaagaaagctgaacaggttcagcaatattctagtcaaggcgttccaaaattctgctgtttatcagattaatcataatgcacaacttgttaaaaagttaaaagatgctcactattttttggtatactccggtaacacttttgagtctagtggtgtatatatgtttgctgctcctgaattattaggttgtgacaatgataccatcttaagaattttgcgaaataaatccattggctgtgatttggtcccaaagcttgacattggaaataatttgaatgtgtatgatataacaacaaaagaaacagatttgaacattctagtatcgaaaggggaggattccaaaggaattccttactaccgagtagtagcaaattcgtcaagtgatttggacaggcatgctcatcagtccaaaaagaagaatttttcaacagacccttttgatcagcaccttgatgaaaagaacaatgaagtttttgaattggaagttgctttgagctcattgggtgcactagttgtactatatcctggagagccagtagtttgggatggaccagtatataagcttccaggtaacaacctttttgcatccaacgaaatggatttagggaaaattggtaacccaaatacgttgattttactcaatcaaggttctaattatgcactgacttatcaaatcgacaagtttaatcaaacggtaggtgattctgtttcattcatagagaaacgttgttcactcaattcaattgaatcctccctacaaaaaatcaataaggcatattacaaacttacttatacagtattgaacaactacaaaggaattctaggtagctttatgaagcaatgtccgggaaatgagttgttaaattcgatattcatgtttggaagggattttggaagaagtttccttaaatataacgcctttagctcaaagaggaagtacgttatcatctttctgatggttaaattaggaatgaactggttgaaattccttgttgaagagtgtgatcctaccgatcagcgaactttccgatggtgcgttcttgcaatggattttgcgatgcagatgactagtggttataatatcctggcgctgaatgtaaagcaatttcaagaactgaaggagagggtatcagtatgtatgtcattattaatttcacatttcgacgttatgggtgcacgagccactgaagctgaaaatggcatgcaacaggcaagattgaatattgatactgaagagaatattgatgaagaggccaccctagaaataaacagcaggttgagactggaagctataaagacgttggaaaagactatgaagaggaatcccaggcaaatgggtaaggtattggatgctacagatcagggaaacaaatacctactatcgctagcatcctcattatcgaatgtatcaatgaggtggcaaaaaagaagcttcattggcggtggaacatttggacaggtatactctgcaattaatctggaaaacggtgaaatcttagctgttaaggaaataaagatacacgataccacaacaatgaagaagatttttcccctgattaaagaagagatgaccgtattggaaatgttaaaccatcctaatattgtccagtactatggtgtcgaagtacatcgcgataaagttaacatcttcatggaatactgtgagggtggttctttagcctcgttattggatcatggaagaattgaagatgaaatggtaacacaagtgtacacattcgaactattagaaggtttggcatatttgcaccaatctggcgtggtgcatcgcgacattaaaccggagaatatcttgctggatttcaatggaatcataaaatatgtggattttggtacggcacgtaccgttgtaggatctaggactagaactgtgcggaacgcagccgttcaagattttggagtagaaacaaagtccctcaatgaaatgatggggacaccgatgtatatggctccagagactatttcaggctcggcagttaagggaaaacttggagcggacgatgtatgggcattaggatgtgttgtgctagaaatggccacaggtagacgaccttggtctaacttggataatgaatgggccatcatgtaccacgttgctgcaggtcgaataccgcaactacccaatagagacgaaatgactgcagcgggaagagccttcttggaaaggtgtttggttcaagaccccactatgagggctactgctgtggaactactgatagacccttggatgatacaaatccgtgaaatagcatttggcaactcagagaaagatcaagtacctatcctaagctcatag

SEQ ID NO: 370 - protein, 1331 aa, Saccharomyces cerevisiae
MMMDILNTQQQKAAEGGRVLAPHTISSKLVKRLSSHSSHKLSRSDLKALGGSETISDGPSQLTFKDRYVFNESLYLKKLKKTALDDYYTRGIKLTNRYEEDDGDDEIIRLSNGDRIDEDLHSGVKFFSTTPYCRKMRSDSDELAWNEIATERFKWQSMLARVLKGDIVKGEKTRIANQVKKPGLNKELSDEIWLELKAWLNGRTMQEMEQSLTYLRDSSDSVFEEIMKFQIPQGKILSLDALEAILQDLMNRYHSVVSYWPNLKKMYKDKPITNTAEFTARIDVMNSWLNFKTNLTLRRQELDDWINRFSPISSSDNCQEDFDGVPQWNCKMKILAEQLMKEKNIESIFQKKIFYPLSPWMFKLKLHFIVYRETLTKMNIKYPYERLRSLLAFPVYLIKEVILTRLSYARKLKNPTMMMIDQMIDDFNAFIRLSVQLKYTLTKYCSNLPFDVDFDPTFENTVIEAIRYLFFLLNLKLIDSSKQNFKAPDLLLKYWDHLKNTGHYINGAETVIPNEFLKLTLRLVHKLQFYLLKQQNFPPTFANASEAEKWLSSIFENLGAMKRKLNRFSNILVKAFQNSAVYQINHNAQLVKKLKDAHYFLVYSGNTFESSGVYMFAAPELLGCDNDTILRILRNKSIGCDLVPKLDIGNNLNVYDITTKETDLNILVSKGEDSKGIPYYRVVANSSSDLDRHAHQSKKKNFSTDPFDQHLDEKNNEVFELEVALSSLGALVVLYPGEPVVWDGPVYKLPGNNLFASNEMDLGKIGNPNTLILLNQGSNYALTYQIDKFNQTVGDSVSFIEKRCSLNSIESSLQKINKAYYKLTYTVLNNYKGILGSFMKQCPGNELLNSIFMFGRDFGRSFLKYNAFSSKRKYVIIFLMVKLGMNWLKFLVEECDPTDQRTFRWCVLAMDFAMQMTSGYNILALNVKQFQELKERVSVCMSLLISHFDVMGARATEAENGMQQARLNIDTEENIDEEATLEINSRLRLEAIKTLEKTMKRNPRQMGKVLDATDQGNKYLLSLASSLSNVSMRWQKRSFIGGGTFGQVYSAINLENGEILAVKEIKIHDTTTMKKIFPLIKEEMTVLEMLNHPNIVQYYGVEVHRDKVNIFMEYCEGGSLASLLDHGRIEDEMVTQVYTFELLEGLAYLHQSGVVHRDIKPENILLDFNGIIKYVDFGTARTVVGSRTRTVRNAAVQDFGVETKSLNEMMGTPMYMAPETISGSAVKGKLGADDVWALGCVVLEMATGRRPWSNLDNEWAIMYHVAAGRIPQLPNRDEMTAAGRAFLERCLVQDPTMRATAVELLIDPWMIQIREIAFGNSEKDQVPILSS

SEQ ID NO: 371 - DNA, 2901 bp, Saccharomyces cerevisiae
atgaatccgggcggtgaacaaacaataatggaacaacccgctcaacagcaacaacaacagcaacaacaacagcagcaacagcaacagcaggcagcagttcctcagcagccactcgacccattaacacaatcaactgcggaaacttggctctccattgcttctttggcagaaacccttggtgatggcgacagggccgcaatggcatatgacgccactttacagttcaatccctcatctgcaaaggctttaacatctttggctcacttgtaccgttccagagacatgttccaaagagctgcagaattatatgaaagagcacttttggtaaatcccgaactatcagatgtgtgggctactttaggtcattgttatctgatgctggatgatctgcaaagagcttacaatgcctatcaacaggctctctaccacctcagtaatcccaacgtaccgaaattatggcatggaatcggcattctttatgacagatatggttcgctcgactatgccgaagaagcttttgccaaagttttggaattggaccctcattttgaaaaggcaaacgaaatttacttcagactaggtattatttataaacatcagggtaaatggtctcaagctttggaatgcttcagatacattctccctcaacctcctgctcccttgcaggagtgggacatatggtttcagttgggtagtgttttggagagtatgggagagtggcaaggtgcgaaggaagcctacgagcatgtcttggctcaaaatcaacatcatgccaaagtattacaacaattaggttgtctttacggtatgagtaacgtacaattttatgaccctcaaaaggcattggattatcttctaaagtcgttagaagcagatccctccgatgccactacatggtaccatctcggtagagtgcatatgattagaacagattatactgccgcatatgatgctttccaacaagctgttaatagagattcaagaaaccctatcttttggtgctcaatcggtgttttatattaccaaatttctcaatacagagacgccttagacgcgtacacaagagccataagattaaatccttatattagtgaagtttggtacgatctaggtactctttacgaaacttgtaacaaccaattatctgacgcccttgatgcgtataagcaagctgcaagactggacgtaaataatgttcacataagagaaagattagaagctttaacaaagcagttagaaaacccaggcaatataaacaaatcgaacggtgcgccaacgaatgcctctcctgccccacctcctgtgattttacaacctaccttacaacctaatgatcaaggaaatcctttgaacactagaatttcagcccaatctgccaatgctactgcttcaatggtacaacaacagcatcctgctcaacaaacgcctattaactcttctgcaacaatgtacagtaatggagcttcccctcaattacaagctcaagctcaagctcaagctcaagcacaagctcaagcacaagcacaagctcaagcacaagcacaagcacaagcgcaagcacaagcacaagcacaggcgcaagcacaggcacaagcacaagcacaagcacatgcacaagcgcaagcacaagcacaagcacaggcacaagcacaagcacaggcgcaggcacaacaacaacaacaacaacagcaacaacaacaacaacaacaacaacaacaacaacaacaacaacaacaacaacaacaacaacagcagcagcaattacagcccctaccaagacaacagctgcagcaaaagggagtttctgtgcaaatgttaaatcctcaacaagggcaaccatatatcacacagccaacagtcatacaagctcaccaactgcaaccattttctacacaagctatggaacatccgcaaagctctcaactgccacctcaacagcaacaactacaatctgttcaacatccacaacaacttcaaggccagcctcaagcccaagctccccaacctttaatccagcataacgtggaacagaacgttttacctcaaaagagatacatggaaggtgcaatccacactttagtagatgccgccgtatccagtagcacccacacagagaataacacaaagtctcctcgtcaaccaacccatgccattccaacgcaagctcccgcaacaggaataacgaacgctgaaccacaggtaaagaagcaaaagttgaactctccaaattcaaacatcaacaaattagtaaatactgctacttccattgaagaaaatgcaaaatctgaggtgagcaaccaatcgccagcagtagtggagtctaataccaataatacttcacaagaagaaaaacctgtaaaagcaaactcaataccttcagtaattggcgcacaggaacctccacaggaagctagtcctgctgaagaagctaccaaagcagcttctgtttctccttctacaaaaccgcttaatacggaaccagagtcatctagtgtccaaccaactgtatcatcagaaagttcaacaacaaaagcaaatgaccaaagcactgctgagaccatagaactttctactgctactgttcctgcagaagcaagccctgtagaagacgaagtaagacagcattctaaagaggaaaacggcacaactgaagcatctgcaccttctactgaagaggcggagccagcagcttccagagatgctgaaaaacaacaagatgaaaccgctgctacaacgataactgtaatcaaacctactttggaaacaatggaaacagtgaaagaggaggccaaaatgcgtgaggaagagcaaacatctcaagaaaaatccccacaggagaacacacttccaagagaaaatgtagtaaggcaagtggaagaagatgaaaactacgacgactaa

SEQ ID NO: 372 - protein, 966 aa, Saccharomyces cerevisiae
MNPGGEQTIMEQPAQQQQQQQQQQQQQQQQAAVPQQPLDPLTQSTAETWLSIASLAETLGDGDRAAMAYDATLQFNPSSAKALTSLAHLYRSRDMFQRAAELYERALLVNPELSDVWATLGHCYLMLDDLQRAYNAYQQALYHLSNPNVPKLWHGIGILYDRYGSLDYAEEAFAKVLELDPHFEKANEIYFRLGIIYKHQGKWSQALECFRYILPQPPAPLQEWDIWFQLGSVLESMGEWQGAKEAYEHVLAQNQHHAKVLQQLGCLYGMSNVQFYDPQKALDYLLKSLEADPSDATTWYHLGRVHMIRTDYTAAYDAFQQAVNRDSRNPIFWCSIGVLYYQISQYRDALDAYTRAIRLNPYISEVWYDLGTLYETCNNQLSDALDAYKQAARLDVNNVHIRERLEALTKQLENPGNINKSNGAPTNASPAPPPVILQPTLQPNDQGNPLNTRISAQSANATASMVQQQHPAQQTPINSSATMYSNGASPQLQAQAQAQAQAQAQAQAQAQAQAQAQAQAQAQAQAQAQAQAQAQAHAQAQAQAQAQAQAQAQAQAQQQQQQQQQQQQQQQQQQQQQQQQQQQQQQQLQPLPRQQLQQKGVSVQMLNPQQGQPYITQPTVIQAHQLQPFSTQAMEHPQSSQLPPQQQQLQSVQHPQQLQGQPQAQAPQPLIQHNVEQNVLPQKRYMEGAIHTLVDAAVSSSTHTENNTKSPRQPTHAIPTQAPATGITNAEPQVKKQKLNSPNSNINKLVNTATSIEENAKSEVSNQSPAVVESNTNNTSQEEKPVKANSIPSVIGAQEPPQEASPAEEATKAASVSPSTKPLNTEPESSSVQPTVSSESSTTKANDQSTAETIELSTATVPAEASPVEDEVRQHSKEENGTTEASAPSTEEAEPAASRDAEKQQDETAATTITVIKPTLETMETVKEEAKMREEEQTSQEKSPQENTLPRENVVRQVEEDENYDD

SEQ ID NO: 373 - DNA, 2097 bp, Saccharomyces cerevisiae
atggtggataaaaataggacgttgcatgaattatcttccaaaaatttcagcagaacgccgaatggactgatctttaccaatgatttaaagacagtatattccatttttctaatttgtttggatttgaaagagaaaaaacatagtagtgacactaagtctttcttattaactgcattcactaaacatttccacttcacttttacatatcaggaagctattaaagcaatgggacaattggaactaaaagtggatatgaacacaacttgtattaacgtttcatataatattaaacctagtttggcgcgccaccttcttacattatttatgtcttctaagctactacatacaccgcaggacagaactcgtggcgagccaaaagagaaagttcttttccaaccaacacctaagggagttgctgttttacaaaagtatgttagagatattgggttgaaaacaatgcctgatattcttttgtcatcgtttaactccatgaaacttttcacttttgagagaagctctgtcacggattcaatcatccatagtgattatttgatccatattcttttcattaaaatgatgggcgctaagccaaatgtttggtctccaacaaacgcagatgacccattaccttgcctatcttcgttgttggaatacactaataatgatgatacatttacttttgagaaatctaagccagaacaaggatggcaagctcagattggaaacatcgatataaatgacttagaaagggtatcgccattagctcatcgattctttacaaatccagattctgagtcgcacacgcaatactacgtttcgaatgcaggtattaggttgtttgaaaataagacgtttggcacttccaaaaaaatcgtgattaagtacacctttacaacaaaggctatatggcagtggataatggactgtactgatattatgcatgttaaagaagcggtctcgttggcagcgttatttttaaaaacggggttgattgtaccagttcttttacaaccatcacgcactgacaagaaaaagtttcaaattagcaggtcctctttttttaccttgtccaagcgtggttgggatttggtttcttggacaggttgtaagagcaataatattagagcaccaaatggtagcaccatagacctagatttcacattaaggggtcatatgactgttcgtgatgaaaaaaagacattggatgatagtgaaggtttttctcaagacatgcttatctcttcgagtaatttaaataaactggactatgtgctaactgatccaggtatgagatatttattcaggcgccatttagaaaaggaactttgtgtagaaaatttggatgtcttcattgagattaagaggtttttgaagaaaatgacaattctgaaaaaattgatagattctaagcattgtgataaaaaatctaataccagtacttcaaaaaacaatatcgtaaaaacgattgattcagctttaatgaaacaggccaatgagtgccttgaaatggcatatcacatttattcgtcctatatcatgataggatcaccatatcaattaaatatccatcataacttgcgtcagaatatttctgacatcatgttgcaccctcattctccattatcggaacactttcctactaatctatacgatccatcacctgcatccgcggaatcagcagcttcatcaattagctcaacggaggctgacacgttaggtgaaccacctgaagtgagtctaaaaccttcaaaaaatctttcaaatgaaaactgttcatttaagaagcaaggattcaaacatcagttaaaggaatataaacctgccccgttaactctggcagaaacgcattcgcctaatgcatcagtagaaaattcacatacaattgttcgttatggcatggacaacacccaaaatgataccaaatcggttgaatcatttccagcaactttgaaggtcctcaggaaattatatcccctcttcgagatcgttagcaatgaaatgtatagactgatgaataacgattcctttcaaaaatttacccagtcagacgtatacaaagatgctagcgctttaatagaaatccaagaaaagtgctaa

SEQ ID NO: 374 - protein, 698 aa, Saccharomyces cerevisiae [sequence omitted]

SEQ ID NO: 375 - DNA, 2154 bp, Saccharomyces cerevisiae
atggaacagacacaaacagcagagggcactgacttactaattggtgacgaaaagaccaacgatttaccttttgtgcagttatttctggaggaaataggatgcactcaatacctggatagctttattcagtgcaaccttgtcacagaagaagaaattaagtatctcgacaaggatatcctcattgctttgggtgtaaacaaaataggagacagactcaaaattttaaggaagtcaaaatcgttccagagagataaacggattgaacaggtgaatagattgaaaaacctgatggaaaaagtaagctctctatccactgctacgctatcgatgaattcagaattgattcctgaaaagcactgtgttatatttatcttaaacgatggttccgctaagaaagttaatgtaaatggttgctttaatgcagattctattaagaaaaggctaatcagaagattgccacatgaattattagccacaaactccaatggagaagtaactaaaatggtccaagattatgatgtgtttgtcttagattataccaagaacgtactgcatttgctatatgacgtggaattagtcactatttgccacgcaaatgatcgtgttgagaaaaataggctaatttttgtttccaaagaccaaacaccaagtgataaagctatatccacatccaaaaaactatatctaagaacgttgagtgcattgagccaggttgggccatcctcgtcaaatttgttggcacagaacaaggggatttcgcataacaatgctgaagggaaactccggatcgacaacacagaaaaggacagaattagacagatttttaatcagaggcctcctagcgaatttatttctaccaatttggccggatattttcctcatacagacatgaagcggttgcaaaagacgatgagagagtcatttcgccattcagcaaggctaagcattgctcaaagaagacctttaagtgcagaatcaaataatatcggtgacatactattgaaacactcaaacgctgttgatatggccctattacaaggattagatcagacaagattaagcagtaaacttgacacaactaaaattccgaagcttgcccataaaaggccagaagataatgatgccatatctaaccagttagaactattaagtgtagagtctggtgaagaagaagatcacgatttctttggggaggacagtgacattgtttcattaccgacgaaaattgccacgcccaagaattggttaaaaggtgcttgcattggatcaggcagttttgggagtgtttacttgggcatgaatgctcacactggtgaactaatggcagtaaagcaagtggagataaaaaataataacattggtgttcccacagacaacaataaacaagccaattctgatgagaataatgagcaggaggaacaacaagagaaaatagaagatgttggggcggtaagtcatccaaaaaccaatcaaaatattcacagaaagatggttgatgctttacagcatgaaatgaatttattgaaggagttacatcatgagaacattgttacttattatggtgcttctcaagaaggcggaaatttaaatatttttcttgaatacgttcctgggggttcggtttcctccatgctgaataattacggtccatttgaggaatcactgattactaatttcactaggcaaatactgattggggttgcgtatttgcataagaagaacattattcacagagatatcaagggtgcaaatattttgattgatatcaaaggttgcgtaaaaattactgattttggtatttcaaaaaaattatcacctttgaataaaaaacaaaataagagagcttctttgcaaggttccgtattctggatgtcaccagaggtggtcaaacagaccgctactactgctaaagcggatatatggtctacaggatgtgttgtcattgaaatgtttaccggtaagcatcctttcccagatttttctcaaatgcaagcgatcttcaaaataggcacaaacacgacccccgagataccttcctgggctacgtcagaaggaaagaatttcttaagaaaggcatttgagttggattatcaatacaggcctagtgcccttgaattgctgcagcatccatggctggatgcacacataatttga

SEQ ID NO: 376 - protein, 717 aa, Saccharomyces cerevisiae
MEQTQTAEGTDLLIGDEKTNDLPFVQLFLEEIGCTQYLDSFIQCNLVTEEEIKYLDKDILIALGVNKIGDRLKILRKSKSFQRDKRIEQVNRLKNLMEKVSSLSTATLSMNSELIPEKHCVIFILNDGSAKKVNVNGCFNADSIKKRLIRRLPHELLATNSNGEVTKMVQDYDVFVLDYTKNVLHLLYDVELVTICHANDRVEKNRLIFVSKDQTPSDKAISTSKKLYLRTLSALSQVGPSSSNLLAQNKGISHNNAEGKLRIDNTEKDRIRQIFNQRPPSEFISTNLAGYFPHTDMKRLQKTMRESFRHSARLSIAQRRPLSAESNNIGDILLKHSNAVDMALLQGLDQTRLSSKLDTTKIPKLAHKRPEDNDAISNQLELLSVESGEEEDHDFFGEDSDIVSLPTKIATPKNWLKGACIGSGSFGSVYLGMNAHTGELMAVKQVEIKNNNIGVPTDNNKQANSDENNEQEEQQEKIEDVGAVSHPKTNQNIHRKMVDALQHEMNLLKELHHENIVTYYGASQEGGNLNIFLEYVPGGSVSSMLNNYGPFEESLITNFTRQILIGVAYLHKKNIIHRDIKGANILIDIKGCVKITDFGISKKLSPLNKKQNKRASLQGSVFWMSPEVVKQTATTAKADIWSTGCVVIEMFTGKHPFPDFSQMQAIFKIGTNTTPEIPSWATSEGKNFLRKAFELDYQYRPSALELLQHPWLDAHII

SEQ ID NO: 377 - DNA, 2067 bp, Saccharomyces cerevisiae
atgaaagtccaaataaccaatagtagaacagaggaaatcttaaaagttcaagctaataatgaaaacgatgaagtcagtaaagctactccgggcgaagttgaagaatcgctaaggttaatcggcgatctaaaattctttttagccacagcgccggtaaattggcaagaaaaccaaattataaggcgatactatctgaatagtggacaaggctttgtctcttgtgtattttggaacaatctatactatattacaggtactgatattgtcaaatgttgtctttacagaatgcaaaagtttgggagagaagtagttcaaaagaaaaaatttgaagagggtattttttcagatttaagaaatctcaaatgtggtatagatgcaactttagaacaaccaaagtccgaatttttgtcgtttctattcagaaatatgtgtctgaaaacccaaaaaaagcagaaagtatttttttggttcagtgtagcacatgataagttgtttgcggatgcgttggaaagagatttaaaaagagaaagtttgaatcagccttcaacgactaagcccgttaatgagcccgccttatctttttcatatgattcctcatctgataagcctctctacgatcagttacttcaacatttagattctagaagaccatctagtacaacaaaatcagataattcgcctccaaaattagaaagcgagaattttaaggataatgagttggtaacagtaactaatcagccgcttttaggcgttggcctcatggatgacgatgcgccagaatccccctctcaaattaatgattttattcctcagaaattgattatagaacccaatactctcgaattgaatggtctcacagaagaaacgcctcatgacttacccaagaataccgctaagggcagagacgaagaagattttcctctcgactattttcctgtatctgttgaataccctacggaggaaaatgcgtttgatccgttccctccacaggcttttacgccagctgccccttccatgcctatttcctatgataacgtgaatgaaagggattctatgcccgttaattctcttcttaatagatacccctatcagttatcagtggcacccactttcccagtgccaccatcatcatcgaggcaacattttatgacaaatcgggatttttattcatctaacaataacaaggaaaaattggtatctcctagcgaccctaccagctacatgaagtatgacgaaccagttatggattttgatgaatctcggccaaatgaaaactgtacaaatgcaaaatctcacaactctggccagcaaactaaacaacaccaattatattctaacaacttccagcaatcttacccaaacggaatggttccaggatactacccaaaaatgccgtataatcccatggggggggatcctctactcgatcaagccttttatggcgcggacgattttttctttccaccagaaggatgtgataacaatatgctgtatccacaaactgcaacttcatggaatgttttgccccctcaagctatgcaaccagctccaacctatgttgggagaccatacacaccgaattatagatcgacaccaggttccgcgatgttcccatacatgcaaagttcaaattccatgcagtggaacactgctgtttcaccttatagttcgagagcaccatctacaactgctaaaaactatcctcctagcacattttattctcaaaatataaatcaatacccacggcgaagaactgtgggaatgaagtcttcacaaggaaatgttccaacaggtaataaacaatctgtgggcaagtctgcaaaaatttcaaagcctctacatattaagacaagtgcttatcagaagcaatacaaaatcaacttggaaacgaaagccaggccaagtgctggtgacgaagattctgctcatcctgataagaacaaagaaatttcgatgcctactccggattccaatactttggtggtccagtcagaagaaggtggagctcattcacttgaggtagataccaatcgaaggtccgataaaaaccttccagatgcaacctga

SEQ ID NO: 378 - protein, 688 aa, Saccharomyces cerevisiae
MKVQITNSRTEEILKVQANNENDEVSKATPGEVEESLRLIGDLKFFLATAPVNWQENQIIRRYYLNSGQGFVSCVFWNNLYYITGTDIVKCCLYRMQKFGREVVQKKKFEEGIFSDLRNLKCGIDATLEQPKSEFLSFLFRNMCLKTQKKQKVFFWFSVAHDKLFADALERDLKRESLNQPSTTKPVNEPALSFSYDSSSDKPLYDQLLQHLDSRRPSSTTKSDNSPPKLESENFKDNELVTVTNQPLLGVGLMDDDAPESPSQINDFIPQKLIIEPNTLELNGLTEETPHDLPKNTAKGRDEEDFPLDYFPVSVEYPTEENAFDPFPPQAFTPAAPSMPISYDNVNERDSMPVNSLLNRYPYQLSVAPTFPVPPSSSRQHFMTNRDFYSSNNNKEKLVSPSDPTSYMKYDEPVMDFDESRPNENCTNAKSHNSGQQTKQHQLYSNNFQQSYPNGMVPGYYPKMPYNPMGGDPLLDQAFYGADDFFFPPEGCDNNMLYPQTATSWNVLPPQAMQPAPTYVGRPYTPNYRSTPGSAMFPYMQSSNSMQWNTAVSPYSSRAPSTTAKNYPPSTFYSQNINQYPRRRTVGMKSSQGNVPTGNKQSVGKSAKISKPLHIKTSAYQKQYKINLETKARPSAGDEDSAHPDKNKEISMPTPDSNTLVVQSEEGGAHSLEVDTNRRSDKNLPDAT

SEQ ID NO: 379 - DNA, 2820 bp, Saccharomyces cerevisiae
atgagcaatgatccatctgctgtatcggaactaccagacaaggacagtcttgataacggtatcagcaatgacaatgaaagggccatgggcggcaatggcgatggcggcgatggattacgattaccaaggaccactggaactttgaacgtcaatgccttacaaaaaggcactaatgctgcccatgaagctggtggatacaaatccatggatcctgcgaagaacgcggagacaaccaatgatgatgacaataatgtcgtttcactagatgatcctattcaatttacccgagtatcttcctcctctgtcatcagtggaatgtcttcatccatgagtcctcattctaacatcgatgaaaccaaatctctagaagcagtcactccaaacataaataccagcaatataaccccggatcattctgctgacaacacattttctaccataaatgcgtccgagtcagatcaccagtttaatgacactttactatcaaaactgtcgttaacagattctacagaaactatagaaaataacgcgacagtgaagcaccagcagccagttgcatcttccacagtaaactcgaataagagctccactgatatacgaagggctacaccagtgtccactcccgttatctctaaaccatcgatgacaaccacgccaagacagatcaattcagcttcccattcgctttcgaaccctaagcataagcaacataaaccaaaagttaaaccgtccaagcctgaagcaaaaagtaaaccggtttctgtgaaaaaaagctttccttcgaaaaatcctttaaaaaactcctctccacctaaaaagcaaacagaaaaatcgtattattcttcctcttcgaaaaaaaggaaaagcggttcaaatagtggtacactaagaatgaaagatgtctttacgtcctttgtacagaatataaagagaaattctcaggatgataaaagggcctcatcgtcgtccaataattcttcctcatcttctataaccaccgctttgaggatatctacgccatacaatgccaagcatatccaccatgtgggcgtggactccaagactggtgagtacacaggtttgccggaggaatgggaaaaattgttgacttctagtggtatttccaaaagagaacaacagcaaaacatgcaagcagtcatggatattgtcaaattctatcaggatgtcacggaaacaaacggtgaagataaaatgttcaagactttcaacacaaccacaggattgccgggaagtcctcaagtttcaacaccgcctgcaaactcattcaataaatttcctccgtcgacaagtgattcgcacaattacggttccagaacaggtacaccaatgtccaatcacgtcatgtctccaaccttaaatacagattctagttcagcaaacgggaaattcataccaagtagaccggctcctaagcccccatcttctgcgtccgcttcagctccaattataaaatcacccgtcatgaattctgccgccaatgtttcgcccttgaagcagactcatgcacctacaactccgaacaggaccagcccaaacaggtcctcaatatcaagaaatgccactttaaaaaaagaggagcagccactaccaccaatacctccaaccaaatccaaaacgtctccaatcatctccacagctcacacaccacagcaagttgctcaatcgccaaaagcgccggcgcaagagacggtaacgacacctacttcgaagccagctcaagcaagaagcttgtctaaagaattaaatgagaaaaagagagaggaaagggaaagacgtaaaaaacaactatatgccaaattgaacgaaatttgctcagacggtgacccaagtacaaaatatgccaatttagtaaaaattggtcaaggtgcatcaggtggtgtttatactgcttatgaaataggtacgaatgtctcagtggccattaagcaaatgaatctcgaaaagcaaccaaaaaaggagctaatcatcaatgagattctggtcatgaagggtagcaaacaccctaatatagttaatttcattgattcttacgttttaaaaggcgacctttgggtcattatggaatacatggaaggtggctccttaactgatgtggtcacccattgtattttgacagaaggtcaaattggtgccgtttgtagagaaactttgagtgggttggaatttttacattctaaaggtgttcttcacagagatatcaaatccgataacatcctattgtccatggaaggggatattaagttaacggatttcggtttttgcgctcaaatcaatgaattgaacttgaaaagaactactatggtgggaacgccttattggatggcgcctgaagtggtttctaggaaagaatatggcccaaaagtagatatctggtcgttgggtatcatgatcattgaaatgatcgagggggagcctccatatttaaatgaaaccccgctaagagcactgtatttaattgctacaaatggtacacccaagttaaaggaacccgagaatctatcgtcaagcttgaaaaaattccttgattggtgtttatgtgtggagcccgaagatagagcaagcgctacggaattgcttcatgatgaatatatcacggagatagctgaagccaattcctcattggccccgctagtcaagttagcaagattgaagaaagtagctgagaacatggatgctgatgaagataatgacgacgataacgacaacgagcatattaataagacaaacaattgtgacgacaataacgatagcaaagaaaccgtaaatttggacgtaactgaagatgataaacaaaagtaa

SEQ ID NO: 380 - protein, 939 aa, Saccharomyces cerevisiae
MSNDPSAVSELPDKDSLDNGISNDNERAMGGNGDGGDGLRLPRTTGTLNVNALQKGTNAAHEAGGYKSMDPAKNAETTNDDDNNVVSLDDPIQFTRVSSSSVISGMSSSMSPHSNIDETKSLEAVTPNINTSNITPDHSADNTFSTINASESDHQFNDTLLSKLSLTDSTETIENNATVKHQQPVASSTVNSNKSSTDIRRATPVSTPVISKPSMTTTPRQINSASHSLSNPKHKQHKPKVKPSKPEAKSKPVSVKKSFPSKNPLKNSSPPKKQTEKSYYSSSSKKRKSGSNSGTLRMKDVFTSFVQNIKRNSQDDKRASSSSNNSSSSSITTALRISTPYNAKHIHHVGVDSKTGEYTGLPEEWEKLLTSSGISKREQQQNMQAVMDIVKFYQDVTETNGEDKMFKTFNTTTGLPGSPQVSTPPANSFNKFPPSTSDSHNYGSRTGTPMSNHVMSPTLNTDSSSANGKFIPSRPAPKPPSSASASAPIIKSPVMNSAANVSPLKQTHAPTTPNRTSPNRSSISRNATLKKEEQPLPPIPPTKSKTSPIISTAHTPQQVAQSPKAPAQETVTTPTSKPAQARSLSKELNEKKREERERRKKQLYAKLNEICSDGDPSTKYANLVKIGQGASGGVYTAYEIGTNVSVAIKQMNLEKQPKKELIINEILVMKGSKHPNIVNFIDSYVLKGDLWVIMEYMEGGSLTDVVTHCILTEGQIGAVCRETLSGLEFLHSKGVLHRDIKSDNILLSMEGDIKLTDFGFCAQINELNLKRTTMVGTPYWMAPEVVSRKEYGPKVDIWSLGIMIIEMIEGEPPYLNETPLRALYLIATNGTPKLKEPENLSSSLKKFLDWCLCVEPEDRASATELLHDEYITEIAEANSSLAPLVKLARLKKVAENMDADEDNDDDNDNEHINKTNNCDDNNDSKETVNLDVTEDDKQK

SEQ ID NO: 381 - DNA, 1041 bp, Saccharomyces cerevisiae
atggaggacggtaaacaggccatcaatgagggatcaaacgatgcttcgccggatctggacgtgaatggcacaatattgatgaataatgaagacttttcccagtggtcggttgatgatgtgataacttggtgtatatccacgctggaggtggaagaaaccgatccattatgtcagagactgcgagaaaatgatattgtaggagatcttttgccggaattgtgcttgcaagattgccaggacttgtgtgacggtgatttgaataaggccataaaattcaagatactgatcaataagatgagagacagcaagttggagtggaaggacgacaagactcaagaggacatgataacggtactgaaaaacttgtacactactacatctgcgaaattgcaagaatttcaatcgcagtacacaaggctgaggatggatgtcttggacgtaatgaagaccagctcaagctcttctccgattaacacacatggagtgtccactacggtaccttcttcaaacaacacaattatacccagtagtgacggtgtgtctctttcacaaacagactatttcgacacagttcataaccgacaatcaccgtcaaggagagaatccccggtaacggtatttaggcaacccagtctttcccactcaaaatctttgcacaaggatagcaaaaacaaagtaccccaaatatctacaaaccaatctcacccatctgccgtttcaacagcgaacacaccggggccatcacctaacgaggcgttaaaacagttgcgtgcatctaaagaagactcctgcgaacggatcttgaaaaacgcaatgaaaagacataacttagcagatcaggattggagacaatatgtcttggtcatttgctatggggatcaagagaggctgttagaattgaacgaaaagcctgtgatcatattcaagaacttaaagcaacagggtttgcaccccgccattatgttaagaagaagaggtgatttcgaagaagtagcaatgatgaacggaagtgacaatgtcacccccggtggaagactctaa

SEQ ID NO: 382 - protein, 346 aa, Saccharomyces cerevisiae
MEDGKQAINEGSNDASPDLDVNGTILMNNEDFSQWSVDDVITWCISTLEVEETDPLCQRLRENDIVGDLLPELCLQDCQDLCDGDLNKAIKFKILINKMRDSKLEWKDDKTQEDMITVLKNLYTTTSAKLQEFQSQYTRLRMDVLDVMKTSSSSSPINTHGVSTTVPSSNNTIIPSSDGVSLSQTDYFDTVHNRQSPSRRESPVTVFRQPSLSHSKSLHKDSKNKVPQISTNQSHPSAVSTANTPGPSPNEALKQLRASKEDSCERILKNAMKRHNLADQDWRQYVLVICYGDQERLLELNEKPVIIFKNLKQQGLHPAIMLRRRGDFEEVAMMNGSDNVTPGGRL

SEQ ID NO: 383 - DNA, 1548 bp, Saccharomyces cerevisiae
atgtttcaacgaaagactttacagagaaggaacttgaaagggctcaatcttaacctgcacccagatgtgggcaataatggccaattgcaggaaaagacagagactcaccagggacaatctcgaatagaaggccacgtgatgtctaacattaatgcaatacagaataatagcaacctgtttttgcgaagaggcataaaaaaaaaactgacgttggatgcgtttggtgatgaccaagctatatcgaaaccaaacactgtggtaatacagcaaccgcaaaatgaacctgttttagttctgtcttctctatcacaatccccgtgtgtatcatcatcatcatctttgtccacgccatgcattatagatgcgtacagtaataatttcggattatcgccatcatccacgaattctactccctctacgattcagggattgtccaatattgcaacaccagttgaaaacgaacattcgatatcactaccacctttggaggaaagcctatcgccagccgcagcagatctgaaagatacgttgtcgggaacttcaaatggtaattatatacaactccaggacttggttcagttggggaaaattggtgctggaaattctggaactgtggtgaaggcactacatgttcctgattccaaaatagttgccaaaaaaaccattcctgtggaacagaataacagtacaatcatcaaccaattagttagggaattatctatcgtcaaaaacgttaagccccatgaaaacattatcaccttctatggagcttattataaccagcatataaataatgaaatcataattttaatggaatactctgattgtggttctttagataaaatactgtccgtttataaaaggtttgttcaaagagggactgtttcgagtaagaaaacctggttcaacgaattaacaatatcaaaaatagcgtatggcgtactaaatggcttggatcatttgtaccgacaatataagatcattcatcgtgatatcaagccttccaatgttctgattaatagtaaggggcagattaagttatgtgattttggagtttccaaaaaactaataaattctatcgctgatacatttgttggaacgtccacttatatgtcaccagagaggatacaaggaaacgtttattctatcaaaggggacgtttggtcattgggcttaatgatcatcgagctggtaactggagagtttcccctaggtgggcataacgatacacctgatggcatattggatttgctgcaacgtattgtcaacgagccttcaccaagattacccaaagaccgtatctattccaaggaaatgacagattttgtcaataggtgttgtattaagaatgaaagggaaaggtcatcgattcatgaattgctacatcatgatcttataatgaaatacgtatcaccgtctaaagatgataaatttagacattggtgtagaaaaataaaatctaaaataaaggaagacaagagaattaaaagagaagccttggaccgtgccaagttagaaaagaaacaatcggaaagatcaacccattga

SEQ ID NO: 384 - protein, 515 aa, Saccharomyces cerevisiae
MFQRKTLQRRNLKGLNLNLHPDVGNNGQLQEKTETHQGQSRIEGHVMSNINAIQNNSNLFLRRGIKKKLTLDAFGDDQAISKPNTVVIQQPQNEPVLVLSSLSQSPCVSSSSSLSTPCIIDAYSNNFGLSPSSTNSTPSTIQGLSNIATPVENEHSISLPPLEESLSPAAADLKDTLSGTSNGNYIQLQDLVQLGKIGAGNSGTVVKALHVPDSKIVAKKTIPVEQNNSTIINQLVRELSIVKNVKPHENIITFYGAYYNQHINNEIIILMEYSDCGSLDKILSVYKRFVQRGTVSSKKTWFNELTISKIAYGVLNGLDHLYRQYKIIHRDIKPSNVLINSKGQIKLCDFGVSKKLINSIADTFVGTSTYMSPERIQGNVYSIKGDVWSLGLMIIELVTGEFPLGGHNDTPDGILDLLQRIVNEPSPRLPKDRIYSKEMTDFVNRCCIKNERERSSIHELLHHDLIMKYVSPSKDDKFRHWCRKIKSKIKEDKRIKREALDRAKLEKKQSERSTH

SEQ ID NO: 385 - DNA, 891 bp, Saccharomyces cerevisiae
atgtctgcaaacggcaagatctctgttcccgaggcggtggtcaattggctgttcaaagtcattcaacccatttataacgacggaagaacaactttccacgattctttagcgctgctggacaattttcacagtttaaggccaagaacaagggtatttacgcactctgacggcactccacaactactgttgtccatatatggtaccattagtactggtgaggatggttcatctcctcacagtattcctgtgatcatgtgggtacccagtatgtacccggtaaaacctccctttataagtataaacttggaaaatttcgacatgaacaccatcagtagttccttgcccattcaagaatacatcgactccaatgggtggattgcgctgcccatactccactgctgggatcctgccgcgatgaaccttataatggtcgtacaagaattaatgagtctcttacacgagccgccacaagatcaggcgcccagtctaccccctaagcccaatacgcagctccagcaggagcagaatactcccccactgcccccaaagcccaagtctccacacctaaaaccgccattgcctccacctccaccacctcaaccggcatctaacgcactcgaccttatggacatggacaacacggatatctccccaaccaaccatcatgaaatgctacaaaatctacaaaccgtagtcaatgagttatacagagaggatgtggactatgtagcggacaagatactgacgagacagaccgtcatgcaagaatcaattgccagattccatgaaataatcgccatcgacaagaaccatttacgagccgttgagcaggctattgagcagaccatgcactcgctaaacgcacagatagacgtcctgaaccgcaaatag

SEQ ID NO: 386 - protein, 296 aa, Saccharomyces cerevisiae
MSANGKISVPEAVVNWLFKVIQPIYNDGRTTFHDSLALLDNFHSLRPRTRVFTHSDGTPQLLLSIYGTISTGEDGSSPHSIPVIMWVPSMYPVKPPFISINLENFDMNTISSSLPIQEYIDSNGWIALPILHCWDPAAMNLIMVVQELMSLLHEPPQDQAPSLPPKPNTQLQQEQNTPPLPPKPKSPHLKPPLPPPPPPQPASNALDLMDMDNTDISPTNHHEMLQNLQTVVNELYREDVDYVADKILTRQTVMQESIARFHEIIAIDKNHLRAVEQAIEQTMHSLNAQIDVLNRK

SEQ ID NO: 387 - DNA, 2157 bp, Saccharomyces cerevisiae
atgggatccgaccggtcgtgtgttttgtctgtgtttcagaccatcctcaagctcgtcatcttcgtggcgatttttggggctgccatatcatcacgtttgtttgcagtcatcaaatttgagtctattatccatgaattcgacccctggttcaattatagggctaccaaatatctcgtcaacaattcgttttacaagtttttgaactggtttgacgaccgtacctggtaccccctcggaagggttactggagggactttatatcctggtttgatgacgactagtgcgttcatctggcacgccctgcgcaactggttgggcttgcccattgacatcagaaacgtttgtgtgctatttgcgccactattttctggggtcaccgcctgggcgacttacgaatttacgaaagagattaaagatgccagcgctgggcttttggctgctggttttatagccattgtccccggttatatatctagatcagtggcggggtcctacgataatgaggccattgccattacactattaatggtcactttcatgttttggattaaggcccaaaagactggctctatcatgcacgcaacgtgtgcagctttattctacttctacatggtgtcggcttggggtggatacgtgttcatcaccaacttgatcccactccatgtctttttgctgattttgatgggcagatattcgtccaaactgtattctgcctacaccacttggtacgctattggaactgttgcatccatgcagatcccatttgtcggtttcctacctatcaggtctaacgaccacatggccgcattgggtgttttcggtttgattcagattgtcgccttcggtgacttcgtgaagggccaaatcagcacagctaagtttaaagtcatcatgatggtttctctgtttttgatcttggtccttggtgtggtcggactttctgccttgacctatatggggttgattgccccttggactggtagattttattcgttatgggataccaactacgcaaagatccacattcctatcattgcctccgtttccgaacatcaacccgtttcgtggcccgctttcttctttgatacccactttttgatctggctattccccgccggtgtattcctactattcctcgacttgaaagacgagcacgtttttgtcatcgcttactccgttctgtgttcgtactttgccggtgttatggttagattgatgttgactttgacaccagtcatctgtgtgtccgccgccgtcgcattgtccaagatatttgacatctacctggatttcaagacaagtgaccgcaaatacgccatcaaacctgcggcactactggccaaattgattgtttccggatcattcatcttttatttgtatcttttcgtcttccattctacttgggtaacaagaactgcatactcttctccttctgttgttttgccatcacaaaccccagatggtaaattggcgttgatcgacgacttcagggaagcgtactattggttaagaatgaactctgatgaggacagtaaggttgcagcgtggtgggattacggttaccaaattggtggcatggcagacagaaccactttagtcgataacaacacgtggaacaatactcacatcgccatcgttggtaaagccatggcttcccctgaagagaaatcttacgaaattctaaaagagcatgatgtcgattatgtcttggtcatctttggtggtctaattgggtttggtggtgatgacatcaacaaattcttgtggatgatcagaattagcgagggaatctggccagaagagataaaagagcgtgatttctataccgcagagggagaatacagagtagatgcaagggcttctgagaccatgaggaactcgctactttacaagatgtcctacaaagatttcccacaattattcaatggtggccaagccactgacagagtgcgtcaacaaatgatcacaccattagacgtcccaccattagactacttcgacgaagtttttacttccgaaaactggatggttagaatatatcaattgaagaaggatgatgcccaaggtagaactttgagggacgttggtgagttaaccaggtcttctacgaaaaccagaaggtccataaagagacctgaattaggcttgagagtctaa

SEQ ID NO: 388 - protein, 718 aa, Saccharomyces cerevisiae
MGSDRSCVLSVFQTILKLVIFVAIFGAAISSRLFAVIKFESIIHEFDPWFNYRATKYLVNNSFYKFLNWFDDRTWYPLGRVTGGTLYPGLMTTSAFIWHALRNWLGLPIDIRNVCVLFAPLFSGVTAWATYEFTKEIKDASAGLLAAGFIAIVPGYISRSVAGSYDNEAIAITLLMVTFMFWIKAQKTGSIMHATCAALFYFYMVSAWGGYVFITNLIPLHVFLLILMGRYSSKLYSAYTTWYAIGTVASMQIPFVGFLPIRSNDHMAALGVFGLIQIVAFGDFVKGQISTAKFKVIMMVSLFLILVLGVVGLSALTYMGLIAPWTGRFYSLWDTNYAKIHIPIIASVSEHQPVSWPAFFFDTHFLIWLFPAGVFLLFLDLKDEHVFVIAYSVLCSYFAGVMVRLMLTLTPVICVSAAVALSKIFDIYLDFKTSDRKYAIKPAALLAKLIVSGSFIFYLYLFVFHSTWVTRTAYSSPSVVLPSQTPDGKLALIDDFREAYYWLRMNSDEDSKVAAWWDYGYQIGGMADRTTLVDNNTWNNTHIAIVGKAMASPEEKSYEILKEHDVDYVLVIFGGLIGFGGDDINKFLWMIRISEGIWPEEIKERDFYTAEGEYRVDARASETMRNSLLYKMSYKDFPQLFNGGQATDRVRQQMITPLDVPPLDYFDEVFTSENWMVRIYQLKKDDAQGRTLRDVGELTRSSTKTRRSIKRPELGLRV

SEQ ID NO: 389 - DNA, 5703 bp, Saccharomyces cerevisiae
atgagatttaccagaggattgaaagcctcttcatctttaagagcgaaagctattggaagactaactaaactttcgacgggtgcaccaaatgatcaaaacagtaatggtacaacattagatttgataactcatacattgcctattttttattccacaaatacgtcaaagatatatactataccacttacattgagtgaatgggaagtactaacttcgctttgtgttgcaatccctaccacgctcgatctggtagagacaatgcttaaagaaataattgcgccttattttctggaaactccaagacaaagaatttcagatgttctgtcctcgaaattcaagttggaacagatgagaaatccgattgaattgctaactttccagctgactaagtttatgattcaagcttgtgaacagtatcccgttctttatgaaaatataggcggcatcatttcaacttattttgagcgtgtattaaagatttttactattaaacaatctggtctactatcattagtgggctttattaatgcatttatccagtttcccaactctacagagcttactaaattcacctggaaaaagttagcgaaacttgtgcttcgtggatcatttctaaacgaagttgataagattttgaattcctcagcaacgtttaccaatgattcaatcgtccagtattacgatgctggaaatgagctatccagtgcctacttattggaattaatatctcgcttgcaagtttcgctaatatctcatctgttaaacacttcacatgtcggcgccaacttgagtgagttcttactaaatcaacaataccaattttacaaatttgatcaagaagtagccgatgaaaacgatgatacgaagtgtattgatgacttttttttcaacgtaagaagcaataaacagttttttacagacatgtgtaaaatttccctgcaattttgttctgagtcacatattctcgacctatctacagacaaccgtgcaagattttcttttgatactcgagcccactacctacaaacgctatgtttaattccgtttatagaagatacagaaagcgagctttttgaaagttttacaaacgttgtttctgaatctattgataaatttttcttatctgatgtcgttacaccatctttgataaaagcaattgtagcttctgcctcattactgaattttttcacggaaaaattgtcattaactctgattcgtatgtttcctttattggtagcgtctccacatatcacgactgaaacagttaatgatgttgcaaaaatattcaccacagggttataccctctaaatgaagatgcaattgtgagtacaatttattccatgaacaacttattagctgtttccgaggacggatcgcccgtcccggtgctccgtgagcgccaattaacaataacatctggaaaaaatattgagaaagactactttcccttgcgaaattcatctgccagtttggatggcactggtgctctgctcggaaatacaactgtgggccaactttcctcccatgatgtcaatagtggagctactatgacataccatgcctctttgatatctaattgtgtggctgcaacgactacaatcgcctcatactataacacccaaagcataacagctttgactatctctattcttacgcaaaaagttaattctatgtcaaaggaattagacggtgttattttgaattctttggcaagactggctccgaatacttcactgacagaattttcgcttttactaaagttcttcaaatcgagaactgttattgcaacaaaaattgatgatagcgcactattgaaaaatattattaaagcgaaatgtgtgatatcaaaagaattgttggccaggcatttttcaagtgacttatatttcatgtatcttcatgatctattggactcaatcattgccagtggggaagtagaacgattggaacatcacagacctcaaacggagatttcccgtgttgctgatcaaatcgctacctacttagagcccctcgccgctctactacctgttccaggcgatacgccattggacatcaataaggatgaagtcactacaaacaagtttaggaacgcctggtttaattttgtcatccatgggtaccacttgggcgggcctattgtcaaacgaaatttttctttcttattaactattgcctataattcaccaccgctggcttctgaatttcctgctaataacaaggagctttcattggaaatgaatacaattttgcgccgcggttcatctaacgaaaatatcaaacaacaaaaacagcagataaccgaatatttcaataccaatattgttcagtacagaacaacttcatcgtctaaaatcatgtttttagcggctgccgttcttctagaaacgataagatgcgaggcaggtgattgttcgaagactctactgtacttctcagacccctccattctttccggttcaattgagaagtgtattgcagttttgtcggtttccatgattagaaaatatgctaggttgattcaaaagggtaacgatgccatattcaactccaaaatgattgctcaacaacttaataacttgctactttgcctttctcatagggaaccaactttgcaggatgccgcttttcatgcctgtgaaatatttatcagatctattccatcatcgttatgtcatcatttgtctctctacaccttattagatatgttaacagccctatttgatagtatcttggactcagaggcgcataaatttgaaccacggtatgaatttaaattaaaacattctaagacaacaatattggttccaagctcatcgtcctggcgcgctacgacactatcaagattgcacaagtcagctaaagaatgggtaagaattctattgaatagaagcaaccaggatactaagattttgttgcaatcatacatatcagatctcggtgagtacagcaggctaaattctgttgaatttggtgtctcatttgccatggatatggctggtttgattttacctgcagataaggaattatcaaggcttacttattatggtccagagaaacctaacacgatttctggatttatatctttacattcttggaggtcaaaatatcttttcgataccgctattacatcatcaccagaggatatcaaaaggcaaataggtatttccactcaaaacataagaaaaaatttgaccttaggaaataagattataactaaagacgtaactgattttcttgatatggctaccgcgttgttaattcttggcaatggtgcaccagcgtcattgatatatgatattgtgcacatcccgttcgaagtcttcacctctgcatctttaaagattgctacaaacgtatggttaacaatcataactgagaagcccgaagttgcacatttgcttttagttgaagtatgctattgctggatgcgctccattgatgacaatattggtctctattctcgcgatcatgacttaaagggcgaagaataccaaaaaatggaatattccccttacgacaaagcaggtatcaacagagatgcaaaaaatgcatcccaagctatgcaaccacatcttcatgttattaaattttttgcttcccatttcgagggcacactatttcaaagtgactttttattgaaaattttcacgaaatgtgcgctttatggtatcaagaatctgtataaggcttcactacacccgttcgctagaatgattcgccacgaattattgttattcgcgactctcgtactaaacgcaagttataagcagggatccaagtatatgggccgtttgtcgcaagaaatcacaaacggtgccctaagttggtttaaaagaccagtagcgtggccattcggctcaaatgagctgaaaatcaaagcagatttatctgttactagggaccttttccttcagctcaacaaattaagctcgctaatgtcacgtcattgcgggaaagattacaagatcctgaactatttcttggcaagcgaaatccagcagattcaaacctggcttactccgactgagaagattgaaggagccgacagcaacgagcttacaagcgatatcgttgaagctacctttgctaaagatccaacattagcaataaatctcttacaacgatgttatagcaagaaagctgaggatgttttagtgggcttagttgcaaaacatgctttaatgtgtgtggggtccccaagtgctcttgacctgttcataaaaggaagccacctgagcagtaagaaagacctacacgcaaccttatactgggcgccagtgagcccgttaaaatctatcaaccttttccttcccgaatggcaaggtaattcttttatcttacaattcagcatatattcgttggaatcacaagatgtgaacttggcattcttctatgttcctcaaatcgtacaatgtttgagatacgataaaaccggatatgtcgaaagattgattttggatactgcgaaaattagtgtgttattttctcatcaaataatctggaatatgcttgcaaactgctacaaggatgatgaaggtatacaagaagatgaaatcaaaccaactctagatcgtattagggagcgtatggtttcaagtttcagccaatctcatcgcgatttttacgaacgtgaatttgaattcttcgacgaagtaactggcatatctggtaagttgaaaccatacataaaaaaaagtaaggctgaaaagaaacataagatcgatgaagaaatgagcaaaattgaggtgaaacctgatgtttatttaccttctaatcctgacggtgtagttattgatattgatcggaagagtggtaagccacttcaatctcacgcaaaggcgccttttatggcgacctttaaaataaagaaagacgtaaaagatcctttgacaggtaaaaacaaggaagttgaaaaatggcaagctgctatcttcaaagtcggtgatgactgtaggcaagatgttctagcgttacaattgatctcgctatttagaaccatttggtctagtattggcttggatgtctacgtttttccctacagagttactgcgacggcaccgggttgtggtgtcatcgatgtgctacccaattcggtatcccgtgatatgttaggacgtgaagctgttaatggattatatgaatatttcactagtaaatttggtaatgaatctactatcgaatttcaaaacgcacgaaacaactttgttaaatccttagcgggatatagcgtaatttcgtatttgttgcaattcaaggatagacataatggtaacattatgtacgatgatcaaggacattgtctacatatcgattttgggtttatttttgatattgtcccaggtggtatcaagtttgaagcagtaccattcaagctgacgaaagaaatggttaaagtgatgggaggttcgccccagaccccagcgtatctggactttgaagaactttgtatcaaggcatatctagccgcccgtccgcacgtggaggccataattgagtgtgtaaatcctatgttaggaagcggtctcccctgctttaagggtcacaagacaattaggaatctaagagcaagatttcaacctcaaaaaaccgatcacgaagctgcactatatatgaaggcgctaatccgtaaaagttatgaaagtatattcactaaaggttatgatgaattccaaaggctcacaaatggcattccgtactga

SEQ ID NO: 390 - protein, 1900 aa, Saccharomyces cerevisiae
MRFTRGLKASSSLRAKAIGRLTKLSTGAPNDQNSNGTTLDLITHTLPIFYSTNTSKIYTIPLTLSEWEVLTSLCVAIPTTLDLVETMLKEIIAPYFLETPRQRISDVLSSKFKLEQMRNPIELLTFQLTKFMIQACEQYPVLYENIGGIISTYFERVLKIFTIKQSGLLSLVGFINAFIQFPNSTELTKFTWKKLAKLVLRGSFLNEVDKILNSSATFTNDSIVQYYDAGNELSSAYLLELISRLQVSLISHLLNTSHVGANLSEFLLNQQYQFYKFDQEVADENDDTKCIDDFFFNVRSNKQFFTDMCKISLQFCSESHILDLSTDNRARFSFDTRAHYLQTLCLIPFIEDTESELFESFTNVVSESIDKFFLSDVVTPSLIKAIVASASLLNFFTEKLSLTLIRMFPLLVASPHITTETVNDVAKIFTTGLYPLNEDAIVSTIYSMNNLLAVSEDGSPVPVLRERQLTITSGKNIEKDYFPLRNSSASLDGTGALLGNTTVGQLSSHDVNSGATMTYHASLISNCVAATTTIASYYNTQSITALTISILTQKVNSMSKELDGVILNSLARLAPNTSLTEFSLLLKFFKSRTVIATKIDDSALLKNIIKAKCVISKELLARHFSSDLYFMYLHDLLDSIIASGEVERLEHHRPQTEISRVADQIATYLEPLAALLPVPGDTPLDINKDEVTTNKFRNAWFNFVIHGYHLGGPIVKRNFSFLLTIAYNSPPLASEFPANNKELSLEMNTILRRGSSNENIKQQKQQITEYFNTNIVQYRTTSSSKIMFLAAAVLLETIRCEAGDCSKTLLYFSDPSILSGSIEKCIAVLSVSMIRKYARLIQKGNDAIFNSKMIAQQLNNLLLCLSHREPTLQDAAFHACEIFIRSIPSSLCHHLSLYTLLDMLTALFDSILDSEAHKFEPRYEFKLKHSKTTILVPSSSSWRATTLSRLHKSAKEWVRILLNRSNQDTKILLQSYISDLGEYSRLNSVEFGVSFAMDMAGLILPADKELSRLTYYGPEKPNTISGFISLHSWRSKYLFDTAITSSPEDIKRQIGISTQNIRKNLTLGNKIITKDVTDFLDMATALLILGNGAPASLIYDIVHIPFEVFTSASLKIATNVWLTIITEKPEVAHLLLVEVCYCWMRSIDDNIGLYSRDHDLKGEEYQKMEYSPYDKAGINRDAKNASQAMQPHLHVIKFFASHFEGTLFQSDFLLKIFTKCALYGIKNLYKASLHPFARMIRHELLLFATLVLNASYKQGSKYMGRLSQEITNGALSWFKRPVAWPFGSNELKIKADLSVTRDLFLQLNKLSSLMSRHCGKDYKILNYFLASEIQQIQTWLTPTEKIEGADSNELTSDIVEATFAKDPTLAINLLQRCYSKKAEDVLVGLVAKHALMCVGSPSALDLFIKGSHLSSKKDLHATLYWAPVSPLKSINLFLPEWQGNSFILQFSIYSLESQDVNLAFFYVPQIVQCLRYDKTGYVERLILDTAKISVLFSHQIIWNMLANCYKDDEGIQEDEIKPTLDRIRERMVSSFSQSHRDFYEREFEFFDEVTGISGKLKPYIKKSKAEKKHKIDEEMSKIEVKPDVYLPSNPDGVVIDIDRKSGKPLQSHAKAPFMATFKIKKDVKDPLTGKNKEVEKWQAAIFKVGDDCRQDVLALQLISLFRTIWSSIGLDVYVFPYRVTATAPGCGVIDVLPNSVSRDMLGREAVNGLYEYFTSKFGNESTIEFQNARNNFVKSLAGYSVISYLLQFKDRHNGNIMYDDQGHCLHIDFGFIFDIVPGGIKFEAVPFKLTKEMVKVMGGSPQTPAYLDFEELCIKAYLAARPHVEAIIECVNPMLGSGLPCFKGHKTIRNLRARFQPQKTDHEAALYMKALIRKSYESIFTKGYDEFQRLTNGIPY

SEQ ID NO: 391 - DNA, 3282 bp, Saccharomyces cerevisiae
atgccatttgatgttttgatatcaaaccaaaaagataataccaatcaccagaacatcacgccaatatcaaaatcagttcttttggcgcctcattcaaaccatccagtgattgaaatagctacgtattcagaaaccgatgtatacgaatgctatatacgtgggtttgaaactaaaatagtgatgagaagaactaaagatgattggattaatattacccaggttttcaaaatagctcaattttcgaagacgaaaagaactaaaatactggaaaaggaatcaaatgatatgcaacatgaaaaagttcaaggtgggtatggtaggtttcaaggtacttggatcccactggattcagcgaagtttttagtcaataagtacgaaataattgaccctgtggtcaactccatcttaacttttcaattcgatccaaataaccctccaccaaagagaagcaaaaatagtatattgaggaagacttcgccgggaacgaagataacttctccatcgagctacaataaaacaccaagaaaaaagaacagtagttcatcaacatcggctacaactacagctgcgaataagaaaggcaagaaaaatgcatcgatcaaccagccgaatccaagtcctttacaaaaccttgttttccaaactcctcaacagttccaagtaaattcatcaatgaatataatgaacaataatgataaccacaccacgatgaatttcaacaatgacacaagacacaatttaataaataatattagtaacaacagcaatcaatctactattattcaacaacaaaaatccattcatgaaaactctttcaataataattattcggcaactcagaaacctcttcaattttttccaattccgacaaatttacaaaacaagaacgttgctctgaataaccctaataataatgacagtaatagttacagccataacatcgacaatgtcattaacagcagtaataacaataataatggcaataataataacttgatcatagttccagacggacctatgcaaagccaacaacaacaacaacatcatcatgaatatttgacgaataacttcaatcattccatgatggactccattacaaatggcaatagtaaaaaaaggaggaaaaagctgaatcaatctaatgaacaacaattttacaaccagcaagaaaaaatacaaaggcatttcaaattaatgaagcaacccttattatggcaatcctttcaaaatccaaatgatcaccataatgagtactgtgacagtaacggcagcaacaataacaacaacactgtagcatccaatggctcctccattgaagtattttcatcaaatgaaaatgataacagtatgaatatgtcttcacgatctatgacaccgttcagcgcaggaaatacttcatctcaaaacaagttggaaaacaaaatgacagatcaagaatacaagcagacgatattaacaatactatcatcggaaaggtcttctgatgtagatcaagcgttgttggctactttatatccggcgcccaaaaattttaacataaattttgaaattgatgatcaaggtcacactccactccattgggctacagctatggcgaatattcctttgataaaaatgctaattaccttaaatgctaatgcattacagtgtaataagctcggttttaattgcatcacaaaatcaattttctacaacaattgctacaaggagaatgctttcgatgaaataatatccatcttaaaaatatgtcttataactcccgacgtaaatggaagattgccatttcattatttaattgaattgagcgttaataagtccaaaaatccaatgataataaaatcttatatggattcgataatattgagcttgggtcagcaggactacaatttgttgaagatatgtttgaactaccaagataatatagggaacactccactgcatttatctgctttaaacttgaacttcgaggtttacaacagactggtatatcttggtgcgtcaacagatatattgaatctagataacgaatcgcctgcgtcaataatgaataagtttaatactccggctggcgggtcaaacagcagaaacaacaacaccaaggcagatcgaaagttagctcgaaaccttcctcaaaagaattattaccaacaacagcaacagcaacagcaaccacaaaacaatgtcaaaattccaaaaattataaaaactcaacatcctgataaagaagattctactgcagatgtcaatatagctaaaacagattctgaagtcaacgaaagtcaatacctgcattccaaccagccaaattctacaaatatgaacactattatggaagacttgtcgaatattaattctttcgtgacgtcgtctgtcattaaagatataaagtctacgccgtccaaaattcttgaaaactctcccattttatacagaagaagatcacagtcaatatcagatgaaaaagaaaaggcaaaggataatgagaatcaagttgaaaagaaaaaggatcccttgaatagtgtgaaaactgccatgccatcattggaatcgccttcttcccttctgccgatacagatgtctccactaggaaagtactcaaaaccgctttcgcagcagatcaacaaattaaatacaaaagtttcttctctacaaagaataatgggtgaagaaattaaaaatctggacaacgaagtagtagaaaccgaatcctctatttctaacaataagaagagattgattacaatagcacatcaaatagaggatgctttcgattccgtatcaaacaaaactcccataaattcgatatcagatttacaatcaaggattaaagaaacatcgtcaaagttgaattctgaaaagcaaaattttattcaaagcttggaaaaatctcaagctttaaaactggctacaattgtccaggatgaggaatcaaaggttgatatgaatactaactcaagttcacatccagaaaaacaggaagatgaagagccaattccaaagtcaacgtcggaaacttcttctcctaaaaacaccaaagcggacgccaaattttctaatactgtacaagaatcatatgatgtaaatgagacgttgagactagcaacggaactaactattctacagtttaaaagaaggatgacaacattgaaaataagcgaagctaaaagcaaaattaattcatcggtgaagttagataaatacagaaacttgattggtatcacaattgagaacattgactcaaaattggacgatatagaaaaggatttgagggcaaacgcataa

SEQ ID NO: 392 - protein, 1093 aa, Saccharomyces cerevisiae
MPFDVLISNQKDNTNHQNITPISKSVLLAPHSNHPVIEIATYSETDVYECYIRGFETKIVMRRTKDDWINITQVFKIAQFSKTKRTKILEKESNDMQHEKVQGGYGRFQGTWIPLDSAKFLVNKYEIIDPVVNSILTFQFDPNNPPPKRSKNSILRKTSPGTKITSPSSYNKTPRKKNSSSSTSATTTAANKKGKKNASINQPNPSPLQNLVFQTPQQFQVNSSMNIMNNNDNHTTMNFNNDTRHNLINNISNNSNQSTIIQQQKSIHENSFNNNYSATQKPLQFFPIPTNLQNKNVALNNPNNNDSNSYSHNIDNVINSSNNNNNGNNNNLIIVPDGPMQSQQQQQHHHEYLTNNFNHSMMDSITNGNSKKRRKKLNQSNEQQFYNQQEKIQRHFKLMKQPLLWQSFQNPNDHHNEYCDSNGSNNNNNTVASNGSSIEVFSSNENDNSMNMSSRSMTPFSAGNTSSQNKLENKMTDQEYKQTILTILSSERSSDVDQALLATLYPAPKNFNINFEIDDQGHTPLHWATAMANIPLIKMLITLNANALQCNKLGFNCITKSIFYNNCYKENAFDEIISILKICLITPDVNGRLPFHYLIELSVNKSKNPMIIKSYMDSIILSLGQQDYNLLKICLNYQDNIGNTPLHLSALNLNFEVYNRLVYLGASTDILNLDNESPASIMNKFNTPAGGSNSRNNNTKADRKLARNLPQKNYYQQQQQQQQPQNNVKIPKIIKTQHPDKEDSTADVNIAKTDSEVNESQYLHSNQPNSTNMNTIMEDLSNINSFVTSSVIKDIKSTPSKILENSPILYRRRSQSISDEKEKAKDNENQVEKKKDPLNSVKTAMPSLESPSSLLPIQMSPLGKYSKPLSQQINKLNTKVSSLQRIMGEEIKNLDNEVVETESSISNNKKRLITIAHQIEDAFDSVSNKTPINSISDLQSRIKETSSKLNSEKQNFIQSLEKSQALKLATIVQDEESKVDMNTNSSSHPEKQEDEEPIPKSTSETSSPKNTKADAKFSNTVQESYDVNETLRLATELTILQFKRRMTTLKISEAKSKINSSVKLDKYRNLIGITIENIDSKLDDIEKDLRANA

SEQ ID NO: 393 - DNA, 2412 bp, Saccharomyces cerevisiae
atggcgttggaagaagtggtacgatacttaggacctcacaatgagatccctttgacactcactagagactcggagactggccatttcctcctgaaacattttctgcccattttgcagcaatatcatgacacggggaatattaacgagaccaaccccgatagtttccccactgatgaggaaagaaataaattactggcacattatggaattgctgtaaatacagacgaccgaggtgagttatggatagagctggaaaaatgtttacaattattaaacatgctaaatttattcggtttgttccaggatgcattcgaatttgaggagcctgaaacagatcaggatgaagaagatcccagccattcgaaactaccagaaaacaagaccaaaagtgaaaattctaaggataatatcagctcaaagaggattaataatttacaagatatgagcctggattctgatgcacacagagaattaggctctcctttaaaaaaactaaaaatagatacctctgtaatagatgctgagagtgactccactccgaatactgccagaggcaagcctaacgatgatattaataagggccctagcggcgacaatgaaaataatggcactgatgacaatgacagaaccgctggacctatcataacattcactcatgacctaacttctgactttttaagcagtccactgaaaatcatgaaagcactaccttctccagttgtaaatgataatgaacagaagatgaaactagaggcattcttacaacggttgttatttccagaaattcaagaaatgcctacatcccttaataatgacagcagtaatagaaattcagaaggggggagctcaaaccaacaacaacagcacgtatcatttgatagccttttgcaagaggtaaacgacgcttttcctaatactcaattaaatcttaatattcctgtagatgagcatggaaacacaccattacattggctgacttcaatagcaaacctggaattagtgaaacacctggttaagcatggttcaaacagattatatggtgataatatgggggagtcatgcctagtgaaagctgtcaaatcagtaaataattacgactctggtacttttgaggcacttctagattatttatatccatgtttaattttggaagactcaatgaatagaacaattttgcaccatatcattattacgtctggtatgactggctgttcagcagctgcgaaatattatttagatattttaatgggatggattgtcaagaaacaaaatagacccattcaaagtggtactaacgaaaaagaaagcaaaccgaatgacaaaaatggggaaagaaaggactctatactagaaaatttggacctgaaatggataatagcaaacatgctcaatgcgcaggactctaatggcgatacttgcttgaacattgcagcaagattgggaaacatttcaatagtagacgctttattagattacggtgctgacccatttattgcaaacaaatcagggttgagacccgtggattttggggcaggtacttcaaaattacaaaatacgaacggcggtgacgaaaactcgaagatggtctctaagggtgattacgacggtcaaaaaaatggaaaggccaaaaaaataaggtctcaactgttgaaaaacccacctgaaacaacttcgttaattaatgatgtccaaaatttactgaattcaatctcgaaagattatgagaatgaaacagtgcaatataatgagaaattagaaaaactacacaaggaattgaacgaacagcgagaagaattagctaattctagagaacaactagcaaatgtgaagcaattgaaagatgaatactcactaatgcaagagcaattgaccaatttaaaagcaggaattgaagaagaagaggaaagttttagggaagagagcaaaaagctaggaataattgcagatgaaagttcaggtattgattgggactctagcgaatatgatgcagatgaacccttcaaagtagagttcctttcagatttcttggaggataaattacaaaagaattatgaaggcgatatttccaaactattagaagcggagtcgaaagagcagataatggaacagatacgaaatcaacttcccgcagaaaaaatccaatcgatgcttccaccaacggtcttattgaaggcaagaataaatgcatacaagcggaatgataaacacctaaccaatgtattggatacaatcagcaccaaacaatcagaattagagaataaatttagaagagtgttatctttatgtttgaaaatcgacgaaaataaagttgacaatatgcttgatggtttgttacaggccatatcttctgaagacccacaagacattgacactgacgaaatgcaagattttttaaaaaagcatgcttcatga

SEQ ID NO: 394 - protein, 803 aa, Saccharomyces cerevisiae
MALEEVVRYLGPHNEIPLTLTRDSETGHFLLKHFLPILQQYHDTGNINETNPDSFPTDEERNKLLAHYGIAVNTDDRGELWIELEKCLQLLNMLNLFGLFQDAFEFEEPETDQDEEDPSHSKLPENKTKSENSKDNISSKRINNLQDMSLDSDAHRELGSPLKKLKIDTSVIDAESDSTPNTARGKPNDDINKGPSGDNENNGTDDNDRTAGPIITFTHDLTSDFLSSPLKIMKALPSPVVNDNEQKMKLEAFLQRLLFPEIQEMPTSLNNDSSNRNSEGGSSNQQQQHVSFDSLLQEVNDAFPNTQLNLNIPVDEHGNTPLHWLTSIANLELVKHLVKHGSNRLYGDNMGESCLVKAVKSVNNYDSGTFEALLDYLYPCLILEDSMNRTILHHIIITSGMTGCSAAAKYYLDILMGWIVKKQNRPIQSGTNEKESKPNDKNGERKDSILENLDLKWIIANMLNAQDSNGDTCLNIAARLGNISIVDALLDYGADPFIANKSGLRPVDFGAGTSKLQNTNGGDENSKMVSKGDYDGQKNGKAKKIRSQLLKNPPETTSLINDVQNLLNSISKDYENETVQYNEKLEKLHKELNEQREELANSREQLANVKQLKDEYSLMQEQLTNLKAGIEEEEESFREESKKLGIIADESSGIDWDSSEYDADEPFKVEFLSDFLEDKLQKNYEGDISKLLEAESKEQIMEQIRNQLPAEKIQSMLPPTVLLKARINAYKRNDKHLTNVLDTISTKQSELENKFRRVLSLCLKIDENKVDNMLDGLLQAISSEDPQDIDTDEMQDFLKKHAS

SEQ ID NO: 395 - DNA, 2220 bp, Aspergillus nidulans
atggctgctgttatcacgctccagtcgtcctcgacggctggtctccaacagggctctccatctgaccgtcatctccttcggccgctgctgcagaataaccctcagcaaccgccgctacagcagcagccgcttcaaccacagcaatccccctctcctgcccccattggcacccttcctcgtcttcctgcactgggccgggatggaccgagttgtgacgcctgtctgcgcagaaagagtcggtgtgctatgaacgaaatggtcaacaagtgttattcgtgcgactttcatcgccaggactgcaccttcaccctatcatcatcgtcaaccaccacaacaaccattaccacgaccgcgaccagcgcgaacagcgcgaacagcgccagcagtgccagcactgccggcaccagccgtccaagcacggctgacgtgcagtctaaaaagcgtaaactggacgatatcatcaatagtgatgcggattctcctaaaaggttatcgaccgtttctaaagctgacagtgctcgttcgcccttgagtgaacacccgcggttcaacgccgtctcatactggcatcagaccacccagcacatcggcctcactaccgagctggagcccgccctactggcctaccttccggtagaccagaacgacgagagtatcgttgctgcttcgcgggtacggaaactcagcgacgacggcacttttatgcgtgtcgtcaacaccatgtcgcatgcggatgctccgcagtccgccaccctggtctccatcgagagcctggttgctccctatgggtccaccttggtagagaagttcttcgagcacatccacccgaccttcccaattctgatggaagatgtcttccgccagtcgtacagaaccaggaatggcatctctccacttttactttctgctgtctacgtcctggccctcaagtttgttgacatcggaccagcctcgcagtccgcgcggcggcccgacgccactcgtcttgaggccactgctttgaggcttcttaatgaatctctaccatatgcatcaatatcgacgatccaagcggggctgttactcatgcaaaagtcgacgttggcaaccgctgctttgaacgcgcaattggtcaccgctgggtttgagctcgggcttcaccaggattgctccgactggcggatggaaacctgggagaagggcctgagaaagcgtctcgcctgggcactttacatgcaggacaaatggtccgcaatggtgcacggccggccatcacatgtcgtttcctccaactggactgtgcaggatctcgtggaagaagattttactgacgcgttcgcctcgaccgcatcccagccggaagacgcccctgtaggccacgggccgcttttcttctgtcatctagtggccctgaccaccattctctccgatatcctggaccgcttttacaccctccagtcaatacaagaatttaaagccgcgggcagcaaccgaacccgtctcatcctagaacgcgccaaaccggcccaaatccgtctcaaggaatggttcgcgcgtctacctgcatccctcaaactagactctaccaccgacctctttgagaacatcacggaggaaaatgcccgcaacggcgccctgcacctctcctacttcgccaccgaaatcactctccatcgctgcatcgtccgctccctctctccagattccacggacgcctacctctcccacatctgccgctccgccgcaaagacccgcctcatctcagcaatggactttgtaaaccgtctccgcccgcctcaccttcgctccttctggcccgccgcatccagaacccactttgccctcatcggctcgttcggcatcctcctacgtgtaacagcgccgaccaaagaagaagccgagttctaccgccttcggctctgcgagtaccgctggaccctgagcgtcagcaaaaaggacgccgaattcctcgagtttgcgctcgagtctctagacaacgcaacggatctagatcatcatgtccctgctaaaccaggaatcgatgagctgatgaccagctcgtcaaaaccatacattgcttctacttcggccagatcggggacgacgcaggaagaggcgattctggatttggacccgcgctctgggaccggaggcacctcctctgttatctcggggctggcttcaccggctacctcggttagtgaggaaagtatgcacgatgcggctgttgctccgatgtaa

SEQ ID NO: 396 - protein, 739 aa, Aspergillus nidulans
MAAVITLQSSSTAGLQQGSPSDRHLLRPLLQNNPQQPPLQQQPLQPQQSPSPAPIGTLPRLPALGRDGPSCDACLRRKSRCAMNEMVNKCYSCDFHRQDCTFTLSSSSTTTTTITTTATSANSANSASSASTAGTSRPSTADVQSKKRKLDDIINSDADSPKRLSTVSKADSARSPLSEHPRFNAVSYWHQTTQHIGLTTELEPALLAYLPVDQNDESIVAASRVRKLSDDGTFMRVVNTMSHADAPQSATLVSIESLVAPYGSTLVEKFFEHIHPTFPILMEDVFRQSYRTRNGISPLLLSAVYVLALKFVDIGPASQSARRPDATRLEATALRLLNESLPYASISTIQAGLLLMQKSTLATAALNAQLVTAGFELGLHQDCSDWRMETWEKGLRKRLAWALYMQDKWSAMVHGRPSHVVSSNWTVQDLVEEDFTDAFASTASQPEDAPVGHGPLFFCHLVALTTILSDILDRFYTLQSIQEFKAAGSNRTRLILERAKPAQIRLKEWFARLPASLKLDSTTDLFENITEENARNGALHLSYFATEITLHRCIVRSLSPDSTDAYLSHICRSAAKTRLISAMDFVNRLRPPHLRSFWPAASRTHFALIGSFGILLRVTAPTKEEAEFYRLRLCEYRWTLSVSKKDAEFLEFALESLDNATDLDHHVPAKPGIDELMTSSSKPYIASTSARSGTTQEEAILDLDPRSGTGGTSSVISGLASPATSVSEESMHDAAVAPM

SEQ ID NO: 397 - DNA, 1461 bp, Saccharomyces cerevisiae
atgagtcttaaagaagacgactttggcaaggataattctagaaatatagaatcatatactggtagaatttttgacgtatatatacaaaaagattcgtattcacagtcggccttggatgatatgtttccagaagccgtagtttcaaccgccgcttgtgtgaaaaatgaagcggaggataacatcaatctcatagacacgcatcctcaattcgaactggtaaatactggactgggtgctaaatcggacgatttgaaatctccatcagcaaaggctacgttcactgacaagcagaggaagaatgaagtaccaaatatatctgtgagcaactactttcccggacaaagtagcgaaacgtcgtcaacaacggaatcttggactatcggttgtgataagtggtcagaaaaggtagaagaggcattccttgaggcacttagactgataatgaaaaatgggaccacaaaaataaaaataagaaatgccaattttggaagaaacgagctgatttcattatatatcaagcacaaaaccaacgagttcagaaccaaaaagcaaatttcttcccatattcaagtctggaagaagaccatacaaaacaaaatcaaggactcgctgaccctatcatcaaaggagaaggagcttctacaccttatcgaacatggcgctgaacaaactactgaaaactcaaacctgttttatgacatatttgaagaaattatcgactctctaccttcagtcagtgattctggaagtttaacccctaaaaacctctatgtaagtaataatagcagtggattgtcagtacattcaaaactgcttacgccaatcactgcttccaacgagaaaaaaattgaaaatttcataaaaactaatgctgcatctcaagccaaaacccccctcatttacgctaagcacatttatgaaaacatagacggctacaagtgcgttccgtcaaagaggcctcttgaacaactttcccccacggaactccaccagggagatcgccccaataaggctagcttttccaacaagaaggcaatcctggagagtgcaaaaaaaatcgaaatagagcagagaaagataatcaacaaataccaaagaatttcccgcatacaagaacatgaaagtaatcctgagttcagttccaattccaattccggttcagagtacgaatcggaggaagaagtagtcccaagatcagccacagtcacacaactccaaagcagaccagtgccatactacaagaataatggaatgccctactcactctccaaagtacgaggaaggcccatgtatccaagacctgctgaagatgcttacaatgccaattatattcaaggtctgccccagtaccaaacatcttatttttcgcagctgttattatcatcaccccagcattacgaacattctccacatcaaaggaactttacgccatccaaccaatcgcatgggaacttttattaa

SEQ ID NO: 398 - protein, 486 aa, Saccharomyces cerevisiae
MSLKEDDFGKDNSRNIESYTGRIFDVYIQKDSYSQSALDDMFPEAVVSTAACVKNEAEDNINLIDTHPQFELVNTGLGAKSDDLKSPSAKATFTDKQRKNEVPNISVSNYFPGQSSETSSTTESWTIGCDKWSEKVEEAFLEALRLIMKNGTTKIKIRNANFGRNELISLYIKHKTNEFRTKKQISSHIQVWKKTIQNKIKDSLTLSSKEKELLHLIEHGAEQTTENSNLFYDIFEEIIDSLPSVSDSGSLTPKNLYVSNNSSGLSVHSKLLTPITASNEKKIENFIKTNAASQAKTPLIYAKHIYENIDGYKCVPSKRPLEQLSPTELHQGDRPNKASFSNKKAILESAKKIEIEQRKIINKYQRISRIQEHESNPEFSSNSNSGSEYESEEEVVPRSATVTQLQSRPVPYYKNNGMPYSLSKVRGRPMYPRPAEDAYNANYIQGLPQYQTSYFSQLLLSSPQHYEHSPHQRNFTPSNQSHGNFY

SEQ ID NO: 399 - DNA, 1194 bp, Saccharomyces cerevisiae
atgtcgactgaagaacaaaatggaggtggtcaaaagtctctagatgatagacaaggtgaggaatcacaaaaaggtgagactagtgaaagggaaacaacagccacagagagcggtaacgaaagtaagtctgtagaaaaagagggtggagaaacccaagaaaaaccgaagcagccacatgtcacttattacaatgaggagcagtataaacagtttattgcccaagcgagagttacagtgggaagtatagtttacaagaactttcagatattaaggacactgggtacgggttcttttggtagggtccatttgattagatcaagacataatggcagatactacgccatgaaagttttgaaaaaggaaatcgtggtaagattgaaacaggtggagcataccaacgacgagcgattgatgctttctatcgtaacacatccgtttattattagaatgtgggggactttccaagatgctcagcaaattttcatgattatggattatattgaaggtggagaattgttttctttgttaaggaaatcccaaagatttcccaacccagttgctaaattttacgcagcggaagtttgtttagctttggagtacttgcatagcaaggacattatttatagggatttgaaaccggaaaatatcttgcttgataaaaacgggcatataaagataacagatttcgggtttgccaaatacgttcctgacgtcacatatacattatgcggtactcccgactacatagcacccgaggtcgttagtactaaaccatataataaatctatcgattggtggagtttcggtattctgatttacgaaatgctagcaggatacacgccattttacgactctaacacgatgaaaacctatgagaaaatcttgaatgccgaattgagatttccaccatttttcaacgaagatgtaaaggacctgttgagtagattgatcacaagagacttaagtcaaagactaggtaatttacaaaatggtacagaagatgtcaaaaaccacccctggttcaaagaagttgtctgggaaaaattattatctagaaacatagaaacgccgtatgaaccgcccattcaacagggacaaggtgacacctcacagttcgataagtacccggaagaagacatcaactacggtgttcaaggtgaagacccatatgctgatcttttccgggacttctaa

SEQ ID NO: 400 - protein, 397 aa, Saccharomyces cerevisiae
MSTEEQNGGGQKSLDDRQGEESQKGETSERETTATESGNESKSVEKEGGETQEKPKQPHVTYYNEEQYKQFIAQARVTVGSIVYKNFQILRTLGTGSFGRVHLIRSRHNGRYYAMKVLKKEIVVRLKQVEHTNDERLMLSIVTHPFIIRMWGTFQDAQQIFMIMDYIEGGELFSLLRKSQRFPNPVAKFYAAEVCLALEYLHSKDIIYRDLKPENILLDKNGHIKITDFGFAKYVPDVTYTLCGTPDYIAPEVVSTKPYNKSIDWWSFGILIYEMLAGYTPFYDSNTMKTYEKILNAELRFPPFFNEDVKDLLSRLITRDLSQRLGNLQNGTEDVKNHPWFKEVVWEKLLSRNIETPYEPPIQQGQGDTSQFDKYPEEDINYGVQGEDPYADLFRDF

SEQ ID NO: 401 - DNA, 1143 bp, Saccharomyces cerevisiae
atggaattcgttgcagaaagggctcagccagttggtcaaacaatccagcagcaaaatgttaatacttacgggcaaggcgtcctacaaccgcatcatgatttacagcagcgacaacaacaacaacagcagcgtcagcatcaacaactgctgacgtctcagttgccccagaaatctctcgtatccaaaggcaaatatacactacatgacttccagattatgagaacgcttggtactggatcttttggtagggttcatttggtgcgctctgttcacaatggtcggtattatgctataaaagttttaaagaaacaacaagttgtcaagatgaaacaggttgaacataccaatgacgaacgacgtatgctaaagcttgtggagcatccgtttctgattagaatgtggggtacgtttcaagatgctaggaatatctttatggtgatggattatatcgaaggtggtgaacttttctcgttactgagaaagtcacaaagatttcctaatcctgtagcaaaattttacgctgcggaagtcatactggcattagagtacttgcatgctcataatatcatctacagggatttaaagccagaaaatatcttgctggatagaaatggccacattaaaataaccgattttgggttcgccaaagaggtacaaactgtcacatggacgctttgtgggactcctgattacattgctcctgaagttattaccacaaagccatataataagtcggtggattggtggtctctaggtgttctaatctacgaaatgttagctggttatacacccttttacgatactactccaatgaagacgtatgaaaagattttacaaggtaaagtagtatatccaccatattttcatcccgacgtcgtggatctactaagcaaactgatcactgcagatttgacaagaagaatcggtaatttacaaagcggttccagggacatcaaagctcacccatggtttagtgaagttgtatgggaaagattgttagcaaaggatattgaaactccatacgagcctcctatcacatcaggtatcggtgacacgtctttattcgatcaatatcccgaggagcagctagattatggtattcaaggcgatgatccatatgctgaatactttcaagatttctaa

SEQ ID NO: 402 - protein, 380 aa, Saccharomyces cerevisiae
MEFVAERAQPVGQTIQQQNVNTYGQGVLQPHHDLQQRQQQQQQRQHQQLLTSQLPQKSLVSKGKYTLHDFQIMRTLGTGSFGRVHLVRSVHNGRYYAIKVLKKQQVVKMKQVEHTNDERRMLKLVEHPFLIRMWGTFQDARNIFMVMDYIEGGELFSLLRKSQRFPNPVAKFYAAEVILALEYLHAHNIIYRDLKPENILLDRNGHIKITDFGFAKEVQTVTWTLCGTPDYIAPEVITTKPYNKSVDWWSLGVLIYEMLAGYTPFYDTTPMKTYEKILQGKVVYPPYFHPDVVDLLSKLITADLTRRIGNLQSGSRDIKAHPWFSEVVWERLLAKDIETPYEPPITSGIGDTSLFDQYPEEQLDYGIQGDDPYAEYFQDF

SEQ ID NO: 403 - DNA, 1197 bp, Saccharomyces cerevisiae
atgtatgttgatccgatgaacaacaatgaaatcaggaaattaagcattactgccaagacagaaacaactccagataacgttggacaagacattcctgtaaacgcacattcggtgcatgaggaatgttcttccaacacacccgtggagataaatggaagaaacagcggaaagttgaaagaagaagcgtctgcaggtatttgtttggttaaaaaaccaatgctacaatatagagatacctcaggaaagtattccctaagtgactttcagattttaagaactttgggaactggctcatttgggagagttcacctaattcgttccaatcacaatgggaggttttacgctttgaagacattgaaaaagcacactatagtgaagctgaagcaggttgaacacaccaatgacgaacgccgaatgctttcaattgtttcacatccattcatcattcgaatgtggggaacgttccaagattctcagcaagttttcatggtaatggactacattgaaggtggtgaattattttctttactacgtaaatctcaaagatttcccaacccagtagccaaattttatgccgcagaggtatgcttagcgttggaatatttgcacagtaaggatataatatatagagacttgaaaccagaaaatatccttctagataaaaacggccatatcaagataaccgactttggcttcgcaaaatacgttcccgatgtcacatacacattatgtggcacaccagattacatagcgccggaagtggtcagtacaaaaccgtataataaatcagtggattggtggagttttggtgtgctaatctatgaaatgcttgccggatacactccattttacaattcgaacaccatgaaaacttacgaaaatatactgaacgccgaattgaagttcccaccatttttccatccagacgcgcaggacttattgaagaagctaattaccagagacttaagtgaaaggttgggtaacttacaaaatggaagtgaagatgtcaagaaccatccgtggtttaacgaagtgatatgggagaaattgttagcaagatacatagaaacgccgtacgaaccaccaatccaacagggccaaggtgacacttctcaatttgacagataccctgaagaggaattcaactatggaattcaaggggaggatccatatatggatttaatgaaagaattttaa

SEQ ID NO: 404 - protein, 398 aa, Saccharomyces cerevisiae
MYVDPMNNNEIRKLSITAKTETTPDNVGQDIPVNAHSVHEECSSNTPVEINGRNSGKLKEEASAGICLVKKPMLQYRDTSGKYSLSDFQILRTLGTGSFGRVHLIRSNHNGRFYALKTLKKHTIVKLKQVEHTNDERRMLSIVSHPFIIRMWGTFQDSQQVFMVMDYIEGGELFSLLRKSQRFPNPVAKFYAAEVCLALEYLHSKDIIYRDLKPENILLDKNGHIKITDFGFAKYVPDVTYTLCGTPDYIAPEVVSTKPYNKSVDWWSFGVLIYEMLAGYTPFYNSNTMKTYENILNAELKFPPFFHPDAQDLLKKLITRDLSERLGNLQNGSEDVKNHPWFNEVIWEKLLARYIETPYEPPIQQGQGDTSQFDRYPEEEFNYGIQGEDPYMDLMKEF

SEQ ID NO: 405 - DNA, 1797 bp, Fusarium sporotrichioides
atgactgtcgtagttccagaggaaggtctcgaccttgaatctcagccggacgacaggatgagagccaaagccctcgccacttcagccgcagagctaccagacggatattacagatcacctcgcatcgtggcgtcctttgcagccttttcaatgaacgtcgttgctacgtattttgttctccaagcatcagcttccgctcttcccaatatactccaagatgttggccagagtgaaaactcaagtctcttctcgactctatggacgactggccaagctgtcagtattctgatgatgggtcgcctcacggacagatttgggcgacggccatttgttattcttactcatattctgggactcgtcggcgctatcgttggatgcacagctaccaaattcaatactctcttggctgcaatgacgatgctgggtgttgccgctggcccagcaggtgccagtcctctattcattggcgagctgatgagcaacaaaaccaagtttttgggtcttctcatcgtatctgctcccgttgtcgccacgaatggtcttagcccctaccctggtcagcgtcttgctatacagggcagttggcgttggatcttctacatttatatcataatgagtacaattgcagtcacacttatcattatctggtactaccccccgtcatttgcgcaacttcacgggaaaaaggtcagcaagagagaggaactagcaaaagtcgattggataggtatcatacttgttattgccggaacatcgctctttcttcttggcgtttcttggggtgggcagccgaacaacccgtggaactctgccaaggtcatcggactcatatcatccggcgctggcactctcgttatctttgccttgtacgaggtctatggcaagcccgaacgccccatggttccgcctagtctcttcaaagatactcgtggctttgtctgcattcttatcatcagctccatcatgggctcgatgcacctttcccttgttatcatgtaccctcagcaagttgtcaatatcttcggctctagtttgaagaactgggaagagactgcatggatgtcagcgactgcctcattcggcacaggtgctggagtggtggttcttggtagcttgtttcatcttgtcaggcacatccgttggcaaatacttgtcggagctatgtggcttactgctttcctcggagccatgtcatctatcaaccgagacaacaagaactctgccattgctttgtcagttatgaccggctttgtcgtcgcctgggctcaggacatcactatgctcctagtccaattcatcacgacagatgaaaacttaggcgtggcctttgctgttgttgctgcggcccgcccctttgccggctctatcttcaccgccgccttcatctccgtctacaccaaccggtatccgcgcgagctggcaacccatcttagttcagccctgcgtggtacgggctttccacaaggaagtttctccagtcttcttgaggccgccaagtcgggacgaatggaagccgtgaacgctctccctgggatgacgaccgaaatctcttcggtggtcagccaagctatggcggatagttacacagcttcatatgctaatgtctattacttcgccatggctctgggtgtcatcccaatcattgccagcctttgtatgagggatttggactgctacttaactgaccacgttccgcatcagctttatgacagaaagaacgcccataaagacgtacttgagggtaactctgaatcacaaccatctccaattatactttcgatggctgataaagaatga

SEQ ID NO: 406 - protein, 598 aa, Fusarium sporotrichioides
MTVVVPEEGLDLESQPDDRMRAKALATSAAELPDGYYRSPRIVASFAAFSMNVVATYFVLQASASALPNILQDVGQSENSSLFSTLWTTGQAVSILMMGRLTDRFGRRPFVILTHILGLVGAIVGCTATKFNTLLAAMTMLGVAAGPAGASPLFIGELMSNKTKFLGLLIVSAPVVATNGLSPYPGQRLAIQGSWRWIFYIYIIMSTIAVTLIIIWYYPPSFAQLHGKKVSKREELAKVDWIGIILVIAGTSLFLLGVSWGGQPNNPWNSAKVIGLISSGAGTLVIFALYEVYGKPERPMVPPSLFKDTRGFVCILIISSIMGSMHLSLVIMYPQQVVNIFGSSLKNWEETAWMSATASFGTGAGVVVLGSLFHLVRHIRWQILVGAMWLTAFLGAMSSINRDNKNSAIALSVMTGFVVAWAQDITMLLVQFITTDENLGVAFAVVAAARPFAGSIFTAAFISVYTNRYPRELATHLSSALRGTGFPQGSFSSLLEAAKSGRMEAVNALPGMTTEISSVVSQAMADSYTASYANVYYFAMALGVIPIIASLCMRDLDCYLTDHVPHQLYDRKNAHKDVLEGNSESQPSPIILSMADKE

SEQ ID NO: 407 - DNA, 2142 bp, Saccharomyces cerevisiae
atgactgccagcgtttcgaatacgcagaataagctgaatgagcttctcgatgccatcagacaggagtttctccaagtctcacaagaggcaaatacctaccgtcttcaaaaccaaaaggattacgatttcaaaatgaaccagcagctggctgagatgcagcagataagaaacaccgtctacgaactggaactaactcacaggaaaatgaaggacgcgtacgaagaagagatcaagcacttgaaactagggctggagcaaagagaccatcaaattgcatctttgaccgtccagcaacagcggcaacagcaacagcagcaacaggtccagcagcatttacaacagcaacagcagcagctagccgctgcatctgcatctgttccagttgcgcaacaaccaccggctactacttcggccaccgccactccagcagcaaacacaactactggttcgccatcggccttcccagtacaagctagccgtcctaatctggttggctcacagttgcctaccaccactttgcctgtggtgtcctcaaacgcccaacaacaactaccacaacagcaactgcaacagcagcaacttcaacaacagcaaccacctccccaggtttccgtggcaccattgagtaacacagccatcaacggatctcctacttctaaagagaccactactttaccctctgtcaaggcacctgaatctacgttgaaagaaactgaaccggaaaataataatacctcgaagataaatgacaccggatccgccaccacggccaccactaccaccgcaactgaaactgaaatcaaacctaaggaggaagacgccaccccggctagtttgcaccaggatcactacttagtcccttataatcaaagagcaaaccactctaaacctatcccacctttccttttggatctagattcccagtctgttcccgatgctctgaagaagcaaacaaatgattattatattttatacaacccggcactaccaagagaaattgacgttgagttacacaaatctttggatcatacttcagttgtttgttgcgtgaagttcagtaacgatggtgaatacttagccacaggctgcaacaaaactactcaagtgtatcgcgtttcagatggttctctggtggcccgtctatctgacgattctgctgccaataaccatcgaaattcgatcactgaaaataacaccaccacgtccacggataacaatacaatgacaaccactactaccaccacaattactaccacagcgatgacttcggcagcagaattggcaaaagatgtggaaaacctgaacacttcgtcttccccatcatccgacttgtatatccgttcagtgtgtttttctccagatgggaaatttttggcaacaggtgctgaagacagactgattagaatttgggatattgaaaatagaaagattgttatgattcttcaaggccacgaacaagatatttattcattggactactttccctcaggtgacaaattagtctccggttctggtgaccgtaccgttcgtatttgggacttacgtacaggccagtgttcattgactttatccattgaagatggtgttaccaccgtcgctgtatcaccaggtgatggtaaatacatcgctgctggttctctagatcgtgctgtgagagtttgggattccgagaccggattcttggtggaaagactagattcggaaaacgaatccggtacaggccacaaggactctgtttatagcgttgtcttcactagagatggacaaagcgttgtatccggctcattagatagatctgttaagctctggaatttgcagaatgcaaacaacaagagcgattcgaaaactccaaattccggcacttgtgaagttacgtatatcgggcataaagactttgtattgtccgtggccaccacacaaaatgatgagtacatcttgtccggttccaaagatcgtggtgtcctgttttgggataagaaatccggcaatccgttattgatgttgcaaggtcataggaattcagttatatctgtggctgtggcaaacgggtctccgctgggtccagaatataacgtttttgctactggtagcggtgattgtaaagcaaggatttggaagtataaaaaaatagcgccaaattaa

SEQ ID NO: 408 - protein, 713 aa, Saccharomyces cerevisiae
MTASVSNTQNKLNELLDAIRQEFLQVSQEANTYRLQNQKDYDFKMNQQLAEMQQIRNTVYELELTHRKMKDAYEEEIKHLKLGLEQRDHQIASLTVQQQRQQQQQQQVQQHLQQQQQQLAAASASVPVAQQPPATTSATATPAANTTTGSPSAFPVQASRPNLVGSQLPTTTLPVVSSNAQQQLPQQQLQQQQLQQQQPPPQVSVAPLSNTAINGSPTSKETTTLPSVKAPESTLKETEPENNNTSKINDTGSATTATTTTATETEIKPKEEDATPASLHQDHYLVPYNQRANHSKPIPPFLLDLDSQSVPDALKKQTNDYYILYNPALPREIDVELHKSLDHTSVVCCVKFSNDGEYLATGCNKTTQVYRVSDGSLVARLSDDSAANNHRNSITENNTTTSTDNNTMTTTTTTTITTTAMTSAAELAKDVENLNTSSSPSSDLYIRSVCFSPDGKFLATGAEDRLIRIWDIENRKIVMILQGHEQDIYSLDYFPSGDKLVSGSGDRTVRIWDLRTGQCSLTLSIEDGVTTVAVSPGDGKYIAAGSLDRAVRVWDSETGFLVERLDSENESGTGHKDSVYSVVFTRDGQSVVSGSLDRSVKLWNLQNANNKSDSKTPNSGTCEVTYIGHKDFVLSVATTQNDEYILSGSKDRGVLFWDKKSGNPLLMLQGHRNSVISVAVANGSPLGPEYNVFATGSGDCKARIWKYKKIAPN

SEQ ID NO: 409 - DNA, 3183 bp, Aspergillus nidulans
atgctgaatcccagtacctcagatatccacacctcgcccacggccgttggaaatggaagaaaacgaccacaccctatagccgattcgggttctgctatgccttcagatccatcggcgcaacaactaccgcatccagccaatgaaagtgccgctatcccgtcgatagcgagttcgtcctctttccgaaacgtctccgcttgcaatcgatgtaggcagaggaaaaacagatgtgaccaacgactgccacgatgccaagcctgcgagaaggcaggggtccgttgcgtcggttacgatccgataacaaaacgtgaaattccccgcagctatgtctacttccttgagtcgagggtcgcgtacctcgagaaggtactgatggataacgggattgagtataatgaagctgtggcattcgatgaggaggaagctgtcaaaatcgaagcggggtatgaagcatatgcgggctcagcaaacggaccagctgccggcgaaatagccgcgcaggatgggagtaatgacaagtccgtgcggatcaagaaggaaaagaatgggcctcttgggctggaaaaggcttcgcgatatgaccatgacccggaggtgaagcaagactccgacgcagaagatggctggcggatacagaacctcgtttcgaatattgggatggtttcggtccaaggaacctcggatccgcggtatctgggttcaacgtctggaatttctttcgcccgggttgtatttgctgcggtaaagagttcagtgcctggaaactcatcggaacgtggtccatcgcgcccgaaggaacgtctaccgcatagcgccacgggaacggaagggagcaccacgcgggactcgtttttcgggctgcagacacggccgatgatgaagtgtgcagcattcccggacagggaactggccgagcggctggccgatctctatttcgaacatgcgaatccgcagatacccattgtacatcgtgttgactttatggaattgctcgaccgtacgtattccgttgacgagaaaagccgctcccctcgcagtctgtattttctcaatatcgtatttgccattggatctggaatcatatttgaagacaaaccagcagaagatcagaaagaaggtcgtgatcattccccctctgcaaccaagagacagcgcctctcaagtcgtcagtatcagccagaagaatatcatgcctctgccattgtccacttagagtctttcttgtcgacttctccaaccactgatggttttggtgctttggaggagcttcaggcagtcctcctccttgcaagttttgctctgctccgtcccgtggcgcctggcctctggtacattgtcggggttcgaatgcgtcttgcagttgaccttggccttcattatgaagatggagcaggcattgatggacctgaaaatgacaatatgaatgctacgaataacaaggacggcgaaaaggcgaagctacgcatcgacgaccacgagcgaggtcgcgcagaatgggtgcgtgactttcgtcggcgattgtggtggtgctgctacagttttgatcgtctggtcagctgctgtgtcggtcgtccgttcggcatcagtgatcaggccataagtacagaattcccatccatcctggaagacaaatatatcactaaatctgggataatcaaagccccggaaggcgctcccagttataaacattctgcctttcattattttaagctgcgcgtgctgcagtcggagattcaggacgttctgcagcaccagcaggcccgattcgcccgacaacgaggcccacccggcgccaggagctttatgcgccttgatgtcgtgtcacccttccttcaaggttttgactctttccgatcgtggcggagggacgttgatcggcggttgttggaatggaagaatagtgcgccgatgccttcggaaaatggtgtgaggtttccacttgagttcctggagttgaactactggcaagcagtcatcatgctctatcagcaaagcctcaccgttcccgctgagttggctgatgagctttcccctgctgaggatgtttccagtccgtccttttctcaggtagaagaggacgaacatgatatctattacaaggttgctgaagctgggcaaaaagtcatacggatataccgtcagatgcatcgtgtgcgattggttaattatacctatctagctactcatcatattttcatggctggaatttcattcctgtatgctatctggcactcgccatatgtgcggagtcgtctgacacttgatgaagtggacttcacggtcctagcagcgacgtcagtgcttagggacctcatgcacaagtgcccacccgcagaagcttgtcgtgacgcattcgaacggatgagcaaggccaccgtcgaaatgagtctttctacaactggctttgggccacaggttgaactgaaccgggtgcagaccagcactagcgggtcaagacagtttaatgcaacgcaatccagatcaaggccatattcgcgacagcaagcagagcaacggcagcgacagagcgcatctcggcgacaattacaaatgagacagtctcggcctctaccaagattcgatatgaacctcgaagatctctttggcgacaaccgcgcagtcgctgagaggcaaggtagtggtggcatgggaaagctagcccaaccctaccctgtctctgagacttcggatcctaattttgcgcggccacaatcccatcgcaatccgtctatggaatattacggccctttcgagaaccccgtctcgccacagcagccccaaccacaaccgcgatactactacaacaattccccccagcagagcggatcacccggcagcgtcgttgcggccagcggtatcccaccataccaagtaacacctacagagcaggaaaacccctcgggcatgggtctcgattatctggattacgatccaacaggtatcgagcgccacgtgtccctgggatctgaagagaactcggactttaaatttcaaggcggcgcacagtcactgggccatggtgctggccataatttcgggatcgatctaggtttcggcatggccgttgattttcaacatgattggagtgaaaatgccaattatgatctacttgaggggtatttcttcggtggagcaggcgcaactggaccgggacatgggcatgggcatggctcgggtatatag

SEQ ID NO: 410 - protein, 1060 aa, Aspergillus nidulans
MLNPSTSDIHTSPTAVGNGRKRPHPIADSGSAMPSDPSAQQLPHPANESAAIPSIASSSSFRNVSACNRCRQRKNRCDQRLPRCQACEKAGVRCVGYDPITKREIPRSYVYFLESRVAYLEKVLMDNGIEYNEAVAFDEEEAVKIEAGYEAYAGSANGPAAGEIAAQDGSNDKSVRIKKEKNGPLGLEKASRYDHDPEVKQDSDAEDGWRIQNLVSNIGMVSVQGTSDPRYLGSTSGISFARVVFAAVKSSVPGNSSERGPSRPKERLPHSATGTEGSTTRDSFFGLQTRPMMKCAAFPDRELAERLADLYFEHANPQIPIVHRVDFMELLDRTYSVDEKSRSPRSLYFLNIVFAIGSGIIFEDKPAEDQKEGRDHSPSATKRQRLSSRQYQPEEYHASAIVHLESFLSTSPTTDGFGALEELQAVLLLASFALLRPVAPGLWYIVGVRMRLAVDLGLHYEDGAGIDGPENDNMNATNNKDGEKAKLRIDDHERGRAEWVRDFRRRLWWCCYSFDRLVSCCVGRPFGISDQAISTEFPSILEDKYITKSGIIKAPEGAPSYKHSAFHYFKLRVLQSEIQDVLQHQQARFARQRGPPGARSFMRLDVVSPFLQGFDSFRSWRRDVDRRLLEWKNSAPMPSENGVRFPLEFLELNYWQAVIMLYQQSLTVPAELADELSPAEDVSSPSFSQVEEDEHDIYYKVAEAGQKVIRIYRQMHRVRLVNYTYLATHHIFMAGISFLYAIWHSPYVRSRLTLDEVDFTVLAATSVLRDLMHKCPPAEACRDAFERMSKATVEMSLSTTGFGPQVELNRVQTSTSGSRQFNATQSRSRPYSRQQAEQRQRQSASRRQLQMRQSRPLPRFDMNLEDLFGDNRAVAERQGSGGMGKLAQPYPVSETSDPNFARPQSHRNPSMEYYGPFENPVSPQQPQPQPRYYYNNSPQQSGSPGSVVAASGIPPYQVTPTEQENPSGMGLDYLDYDPTGIERHVSLGSEENSDFKFQGGAQSLGHGAGHNFGIDLGFGMAVDFQHDWSENANYDLLEGYFFGGAGATGPGHGHGHGSGI

SEQ ID NO: 411 - DNA, 1587 bp, Saccharomyces cerevisiae
atgaattatggcgtggagaagctgaaattgaaatattcgaagcatgggtgtattacttgcaagatcagaaagaagagatgctctgaagataaacctgtgtgccgggactgtcgtcgattaagttttccctgtatctatatatcagaatctgttgataagcagtctttgaaaaaaataaaggcagatatacagcaccagttgatcagcaagaaaagaaagcatgctcctgacagtgctcagaaagcggccgtggccacccgtactcgacgggtcggtagcgacgaacaggataaccaggtatatttgtcaaaaccgctggaagattgcatttctcagaagctggactctatgggattgcagctgtacaactactacaggtctcaccttgcaaacataatttccatcgcgcccatgaaccagaactactatctgaacattttcttgccaatggcccacgagaatgatggtatattgtttgctattcttgcttggtcagctaatcatttgtctatatcatcatcaaatgagctgcgaaaggatgaaatatttgtcaacttggcgaacaagtatacatacatgtcgttatcgcatctaaagacaaacgagggctcaagtgcctgtgctaaactggggtttctatattcactagcacaaatcctaatcttatgtggttcagagatatgtcagggtgatgtgaaattttggaagatattattgaatataggaaaaaatttgatcgaaaaccatgtgggcaaggatgtctcacggatactaaccactactacagaagaaccctccctagaggagaggataatcttccccaatttcaattccgttgttaagtactggctgattgtgaattttatatatcatgatattttgaatttcaatacaacgtccttcccgatcgaacaatacgagaaattcttccaaagggatcagaactctttacccagctcagccaactttattgagtcaatagactcgccaattgaggaaatagaccctttaattggcatcaacaagcctattttactactattgggacaagtcacaaatttgacgaggtttttgcagactatggaacaggaagaaatgctagagcatggcgataaaattttgagtttgcaagtcgagatttataaattacaaccttcgcttatggcgctggaacatttggatgatgaaaagaaattttactatttagaactattcgagataatgaaaatttctaccttaatgttctttcaattaactttattaaagattgacaaagattcgctggaactacagatactgagaaacaaattggactcgaagctagacaaggtcatcggaacttttttggaaggatcgttatgcttcccacttttcatttacggtgtatgcattcaggtagaagatatggagaaaaaaatagatttggaagccaaatttgacgacattttaaaacgatataaatgttacaatttccaaaatgctagattattgatacggaaaatttggcaaaacgaggctgatggcatcagtgagcatgacctggtccacatgattgacgaattagattacaatattaattttgcctga

SEQ ID NO: 412 - protein, 528 aa, Saccharomyces cerevisiae
MNYGVEKLKLKYSKHGCITCKIRKKRCSEDKPVCRDCRRLSFPCIYISESVDKQSLKKIKADIQHQLISKKRKHAPDSAQKAAVATRTRRVGSDEQDNQVYLSKPLEDCISQKLDSMGLQLYNYYRSHLANIISIAPMNQNYYLNIFLPMAHENDGILFAILAWSANHLSISSSNELRKDEIFVNLANKYTYMSLSHLKTNEGSSACAKLGFLYSLAQILILCGSEICQGDVKFWKILLNIGKNLIENHVGKDVSRILTTTTEEPSLEERIIFPNFNSVVKYWLIVNFIYHDILNFNTTSFPIEQYEKFFQRDQNSLPSSANFIESIDSPIEEIDPLIGINKPILLLLGQVTNLTRFLQTMEQEEMLEHGDKILSLQVEIYKLQPSLMALEHLDDEKKFYYLELFEIMKISTLMFFQLTLLKIDKDSLELQILRNKLDSKLDKVIGTFLEGSLCFPLFIYGVCIQVEDMEKKIDLEAKFDDILKRYKCYNFQNARLLIRKIWQNEADGISEHDLVHMIDELDYNINFA

SEQ ID NO: 413 - DNA, 1065 bp, Saccharomyces cerevisiae
atgatgaataacaacggcaaccaagtgtcgaatctctccaatgcgctccgtcaagtaaacataggaaacaggaacagtaatacaaccaccgatcaaagtaatataaattttgaattttcaacaggtgtaaataataataataataacaatagcagtagtaataacaataatgttcaaaacaataacagcggccgcaatggtagccaaaataatgataacgagaataatatcaagaataccttagaacaacatcgacaacaacaacaggcattttcggatatgagtcacgtggagtattccagaattacaaaattttttcaagaacaaccactggagggatatacccttttctctcacaggtctgcgcctaatggattcaaagttgctatagtactaagtgaacttggatttcattataacacaatcttcctagatttcaatcttggcgaacatagggcccccgaatttgtgtctgtgaaccctaatgcaagagttccagctttaatcgatcatggtatggacaacttgtctatttgggaatcaggggcgattttattacatttggtaaataaatattacaaagagactggtaatccattactctggtccgatgatttagctgaccaatcacaaatcaacgcatggttgttcttccaaacgtcagggcatgcgccaatgattggacaagctttacatttcagatacttccattcacaaaagatagcaagtgctgtagaaagatatacggatgaggttagaagagtttacggtgtagtggagatggccttggctgaacgtagagaagcgctggtgatggaattagacacggaaaatgcggctgcatactcagctggtacaacaccaatgtcacaaagtcgtttctttgattatcccgtatggcttgtaggagataaattaactatagcagatttggcctttgtcccatggaataatgtcgtggatagaattggcattaatatcaaaattgaatttccagaagtttacaaatggacgaagcatatgatgagaagacccgcggtcatcaaggcattgcgtggtgaatga

SEQ ID NO: 414 - protein, 354 aa, Saccharomyces cerevisiae
MMNNNGNQVSNLSNALRQVNIGNRNSNTTTDQSNINFEFSTGVNNNNNNNSSSNNNNVQNNNSGRNGSQNNDNENNIKNTLEQHRQQQQAFSDMSHVEYSRITKFFQEQPLEGYTLFSHRSAPNGFKVAIVLSELGFHYNTIFLDFNLGEHRAPEFVSVNPNARVPALIDHGMDNLSIWESGAILLHLVNKYYKETGNPLLWSDDLADQSQINAWLFFQTSGHAPMIGQALHFRYFHSQKIASAVERYTDEVRRVYGVVEMALAERREALVMELDTENAAAYSAGTTPMSQSRFFDYPVWLVGDKLTIADLAFVPWNNVVDRIGINIKIEFPEVYKWTKHMMRRPAVIKALRGE

SEQ ID NO: 415 - DNA, 729 bp, Saccharomyces cerevisiae
atgcaaaaacacaatataaaattaaaccaaaaccaggatatttcccaattattccacgatgaagtacccttattcgacaactctataacttcaaaggataaagaagtcattgaaactttatctgaaatatattctatagtaatcacactagaccacgtagagaaagcctacctaaaagactccatagatgacacccaatacactaatactgttgacaaattactaaagcagttcaaggtctacctgaattctcagaataaagaagagataaacaagcatttccaatccatagaagcgttctgcgatacatacaacatcactgcttcgaacgcaataacaagactggagaggggcataccaattacagcagaacatgcgatatccactaccacatcggctccctctggtgataataaacaaagttcttctagcgacaaaaagtttaatgctaaatacgtcgctgaggccactggtaatttcatcactgtaatggatgctttgaaactaaactataatgcaaaagatcaattacatcccttattggctgaactgttaatcagcataaatcgcgtcaccagggatgattttgagaatagatcaaaactcattgactggattgtcagaataaataaactctcaattggtgacactttaactgaaacacaaattagagaacttctgtttgatctagaactagcctataaaagtttttatgctttactggattaa

SEQ ID NO: 416 - protein, 242 aa, Saccharomyces cerevisiae
MQKHNIKLNQNQDISQLFHDEVPLFDNSITSKDKEVIETLSEIYSIVITLDHVEKAYLKDSIDDTQYTNTVDKLLKQFKVYLNSQNKEEINKHFQSIEAFCDTYNITASNAITRLERGIPITAEHAISTTTSAPSGDNKQSSSSDKKFNAKYVAEATGNFITVMDALKLNYNAKDQLHPLLAELLISINRVTRDDFENRSKLIDWIVRINKLSIGDTLTETQIRELLFDLELAYKSFYALLD

SEQ ID NO: 417 - DNA, 1701 bp, Saccharomyces cerevisiae
atggagtactggcattatgtggaaactacgtcatcgggccaacctcttcttcgagaaggtgaaaaagatatctttatcgatcagtccgtaggtctttaccatggcaaatctaagattctacagcgacagaggggcagaatctttttaacgtcacaaagaattatctacatcgacgatgcaaagcccactcagaactcgcttgggttggaattggacgatctagcgtatgtaaactattcatctggcttcttgaccagatcacctcgtctgatcctgtttttcaaggacccctccagtaaggatgaacttggtaaaagtgcggaaacagcaagtgccgacgttgtttcgacgtgggtctgccccatctgtatggtttcgaacgaaacgcagggggaattcactaaagacactctacctacacccatttgtatcaattgcggtgtgccagcggactatgagctcaccaagtcgtctataaattgttctaatgcaatcgacccgaacgccaacccacagaatcagttcggagtgaactctgagaacatttgccccgcctgtacttttgctaatcatcctcaaataggaaattgcgagatttgcggccacagattgcctaatgcatccaaagtacgatcaaagctgaacaggctaaactttcatgattctagggtccatattgagctagaaaaaaattcactggctagaaacaagagctcgcactcggcattatcgtcctcgtcctcgacaggatcatcgacagaattcgtgcaattgagtttccgcaaatctgatggcgtattgttttcacaagctacagagagggctttggagaatatactcactgaaaagaataagcatattttcaatcagaatgtggtttctgtaaatggtgtagacatgaggaaaggggctagttctcacgaatacaacaatgaggtgccatttattgagactaaattgagcagaattggcatatcaagcttggaaaaatctagagaaaaccagcttttgaacaatgacattctctttaacaatgcgttgaccgacctaaacaagctaatgtcgctggctaccagcatcgaaagactatacaaaaatagcaacataacgatgaaaaccaagacattgaacttacaggatgaatcaaccgtgaatgaaccgaaaacgagaagaccgctattgatacttgatagagagaagttcctaaataaagagctgttcttggatgagattgcgagagaaatttacgagttcacgttgtccgagtttaaagatttgaacagtgataccaactatatgatcataactctggtagatctatatgcaatgtacaacaaatctatgcgtataggtacaggcctgatatctcccatggaaatgagagaagcatgcgaaagattcgagcatttaggtctaaatgaattgaagttagtgaaagttaacaaaagaatattatgtgtaacgagcgaaaaattcgacgttgtaaaagaaaagctagtagatctgatcggtgataatcctggttctgatctcctaagattgacacagattttgagttccaataattcaaaatcaaactggacgctaggtatccttatggaggtattacaaaattgtgtcgatgaaggcgatttactgatagacaagcaactgagtgggatttactactataaaaactcttattggccctcgcatatataa

SEQ ID NO: 418 - protein, 566 aa, Saccharomyces cerevisiae
MEYWHYVETTSSGQPLLREGEKDIFIDQSVGLYHGKSKILQRQRGRIFLTSQRIIYIDDAKPTQNSLGLELDDLAYVNYSSGFLTRSPRLILFFKDPSSKDELGKSAETASADVVSTWVCPICMVSNETQGEFTKDTLPTPICINCGVPADYELTKSSINCSNAIDPNANPQNQFGVNSENICPACTFANHPQIGNCEICGHRLPNASKVRSKLNRLNFHDSRVHIELEKNSLARNKSSHSALSSSSSTGSSTEFVQLSFRKSDGVLFSQATERALENILTEKNKHIFNQNVVSVNGVDMRKGASSHEYNNEVPFIETKLSRIGISSLEKSRENQLLNNDILFNNALTDLNKLMSLATSIERLYKNSNITMKTKTLNLQDESTVNEPKTRRPLLILDREKFLNKELFLDEIAREIYEFTLSEFKDLNSDTNYMIITLVDLYAMYNKSMRIGTGLISPMEMREACERFEHLGLNELKLVKVNKRILCVTSEKFDVVKEKLVDLIGDNPGSDLLRLTQILSSNNSKSNWTLGILMEVLQNCVDEGDLLIDKQLSGIYYYKNSYWPSHI

SEQ ID NO: 419 - DNA, 1734 bp, Saccharomyces cerevisiae
atgaacctttttgatgtggctgacttttatataaacaaaattgtgacttcccaatcgaaattgagcgtagccaatgtcaatgaacaccaaaggattaaggttttgctgttggataagaataccacacctacgatatccttatgtgccactcaaagtgagttgttgaagcatgaaatatatctggtagaaagaatagaaaatgagcaacgtgaagtgtccaggcatttaaggtgcttagtttacgttaaacccacagaggaaacactgcaacatctgctgcgtgagttaagaaatcctcggtacggcgagtatcaaatattctttagtaatattgtctctaaatctcaattagaacggctagctgaatctgacgacttggaagctgttactaaggtggaagaaatattccaagacttttttatattaaaccaagatttattttcgtttgatttgcaaccaagagaatttttaagtaataaattggtttggagcgaaggggggctaacaaaatgtaccaacagcttagtttctgtgcttttatccttaaagataaaaccagatatcaggtatgaaggagcaagtaaaatttgtgaaagattggctaaagaagtttcctatgagattggtaaaaacgaaagaactttttttgattttcctgtgatggattcgacacctgtgttactaattttagatcgtaatactgatcctataacacctttacttcaaccttggacctaccaatcaatgatcaatgagtatataggcattaagcggaatatagttgatttatcgaaagtgcctagaattgataaagacctggagaaggtcaccttatcatcaaagcaagatgctttcttcagggataccatgtatttgaattttggtgaattgggtgataaagtaaaacaatatgtgactacatacaaagacaagacacaaaccaacagccaaataaattccattgaggatattaaaaactttattgagaagtatccagagtttagaaaattatctggaaatgttgcaaagcatatggctatagtgggggaattagacagacagttgaagataaaaaatatatgggaaattagtgaaatagaacaaaatctatcagcacacgatgccaatgaagaagatttctccgatttgattaaattgctacaaaatgaagcagttgataagtattacaagttaaagcttgcatgtatttattctttaaacaatcaaaccagctcagacaaaatccgtcaactagttgagattctgtctcaacaacttcctccagaggacgtcaactttttccataaatttaaatcgctttttagccgccaggataaaatgactcaaagtaaccatgacaaggacgatatattaaccgaactagcaagaagatttaatagtagaatgaattctaagagcaacaccgctgaaaacgtctatatgcaacatattccggaaatttcgtcattactaacagatctctctaaaaatgcgttattcagggatcgtttcaaagaaatagatactcaaggccatagagtgatcggaaaccagcagagcaaagatattcctcaggatgtaatattgtttgttattggcggtgtaacttatgaggaggcaaggctagtccatgatttcaatggaacgatgaataacagaatgagggtggttttaggaggcacctctatactttcaactaaagaatatatggattctattagatctgcaaaataa

SEQ ID NO: 420 - protein, 577 aa, Saccharomyces cerevisiae
MNLFDVADFYINKIVTSQSKLSVANVNEHQRIKVLLLDKNTTPTISLCATQSELLKHEIYLVERIENEQREVSRHLRCLVYVKPTEETLQHLLRELRNPRYGEYQIFFSNIVSKSQLERLAESDDLEAVTKVEEIFQDFFILNQDLFSFDLQPREFLSNKLVWSEGGLTKCTNSLVSVLLSLKIKPDIRYEGASKICERLAKEVSYEIGKNERTFFDFPVMDSTPVLLILDRNTDPITPLLQPWTYQSMINEYIGIKRNIVDLSKVPRIDKDLEKVTLSSKQDAFFRDTMYLNFGELGDKVKQYVTTYKDKTQTNSQINSIEDIKNFIEKYPEFRKLSGNVAKHMAIVGELDRQLKIKNIWEISEIEQNLSAHDANEEDFSDLIKLLQNEAVDKYYKLKLACIYSLNNQTSSDKIRQLVEILSQQLPPEDVNFFHKFKSLFSRQDKMTQSNHDKDDILTELARRFNSRMNSKSNTAENVYMQHIPEISSLLTDLSKNALFRDRFKEIDTQGHRVIGNQQSKDIPQDVILFVIGGVTYEEARLVHDFNGTMNNRMRVVLGGTSILSTKEYMDSIRSAK

SEQ ID NO: 421 - DNA, 1986 bp, Saccharomyces cerevisiae
atgcaaagttcagtttattttgaccaaacagggtcatttgcgtccagtagcgacaacgttgtgtctagtaccaccaacacacacaacatttctcccagtcatcgttccagtttgaatctgaacactacttctcatccccacgaagcgtcgggtagaggaagcgcaagtggggagttgtatttgaatgacacaaactcacccttagcgatatcttctatgctaaacacacttgcccttggaagtatgccccaagacattgcaagcagcaacattagcaatcacgataacaacattaaggggagctacagcctaaaattgtcaaatgtagccaaggatattactctcagagaatgctatgcaatcttcgctcttgctgaaggtgtgaaaagtatagaattacagaaaaaaaactcttcatcaagcatcacttctgcctcattagaagacgagaatgatatttttatcattgccagatttgagttattgaatctagctattaattatgccgttattttgaattcgaaaaatgaactctttggacccagttttcccaataaaacaaccgttgaaataatagatgacacaacaaaaaacttggtttcattcccatcatctgccattttcaatgacacctcaagattgaataaatcgaactcgggaatgaaaaggccaagtctgttatcacaaagatccaggttttcattcagcgatccattttccaatgattctcctttaagccaacagcaatctcaacagcagcagcaacagccacaacagccacaacaacactctacgcaaaaacattcaccacaacaatgtaatcaacaacaagtgaattcttcaataccgttatcttctcaaggccaggttattgggttacattctaaccattcacatcaagatttgtctgtggaatcaacaattcaaacatctgatattggcaaatctttccttttgagagataacactgaaattaatgaaaagatatggggcacaagcggtataccttccagcatcaacggttacatgagcactccccaaccttctacgccaactttagaatggggaaatacttctgcatcccaacatggttcttcgttctttttaccctctgcagcatcgacagccattgcacctacgaatagcaacaccagtgccaatgcaaacgccagctccaacaatggagccagcaataatggtgctaaccaggcactctctgccagctcgcaacaaccaatgatgcaaattggtaacacgattaacacttccctaacctcttcaaattcattgcctccatacggtttaatgtcttctcaatcgcagcacatttcaaatatggtaaacacctctgatatgaacattacacctcaaaaacagaacagatttatgcaacaaccccaaccagagcatatgtatcctgtgaatcaaagtaacactcctcaaaaagtaccgcccgcaagattaagttcaagtagaaattcacacaagaataactctactacctcattatcctcaaatattactggatctgcctcgatttctcaggctgatttgtcactactagccagaattccacctcctgccaaccctgctgatcaaaatccaccttgtaataccctttatgtagggaatttaccctccgacgctactgagcaagaactaagacagctattttctggtcaagaaggcttcagaagactatcattcaggaataagaataccacatctaatggtcatagtcacggaccgatgtgcttcgttgaattcgatgatgtcagttttgcaaccagagcgttagctgaattgtatggtagacagttacctcgctccactgtgagcagtaagggaggtatcagattaagcttttcaaaaaacccactgggtgttaggggcccaaacagcagaagaggaggcagtggtaacccaaatcctaatgtaaatatgctttccagttacaattctaatgttggtcatataaaaaactaa

SEQ ID NO: 422 - protein, 661 aa, Saccharomyces cerevisiae
MQSSVYFDQTGSFASSSDNVVSSTTNTHNISPSHRSSLNLNTTSHPHEASGRGSASGELYLNDTNSPLAISSMLNTLALGSMPQDIASSNISNHDNNIKGSYSLKLSNVAKDITLRECYAIFALAEGVKSIELQKKNSSSSITSASLEDENDIFIIARFELLNLAINYAVILNSKNELFGPSFPNKTTVEIIDDTTKNLVSFPSSAIFNDTSRLNKSNSGMKRPSLLSQRSRFSFSDPFSNDSPLSQQQSQQQQQQPQQPQQHSTQKHSPQQCNQQQVNSSIPLSSQGQVIGLHSNHSHQDLSVESTIQTSDIGKSFLLRDNTEINEKIWGTSGIPSSINGYMSTPQPSTPTLEWGNTSASQHGSSFFLPSAASTAIAPTNSNTSANANASSNNGASNNGANQALSASSQQPMMQIGNTINTSLTSSNSLPPYGLMSSQSQHISNMVNTSDMNITPQKQNRFMQQPQPEHMYPVNQSNTPQKVPPARLSSSRNSHKNNSTTSLSSNITGSASISQADLSLLARIPPPANPADQNPPCNTLYVGNLPSDATEQELRQLFSGQEGFRRLSFRNKNTTSNGHSHGPMCFVEFDDVSFATRALAELYGRQLPRSTVSSKGGIRLSFSKNPLGVRGPNSRRGGSGNPNPNVNMLSSYNSNVGHIKN

SEQ ID NO: 423 - DNA, 1512 bp, Saccharomyces cerevisiae
atgcacctagatctcatacacaagtccttcatcttagtgtggctcatatatatacgagccgcgttggctgaccaattcacatataaagcttgctattcagctagtgatatacgaaaattggggttgacttacaagggtgtttacgagtatcaatcagtttcctactgtcaaaatgaatgccctggtcaggctgtcgttgctcttttcaacggtacaggttgctactgtggtggttccgtagctcagttacagtctttgacgcaggtagattcgagcaaatgtgatgtttcgtgtgctggctggccctaccaaaattgtggtggttcttctgccatgaacgtttatatcaataacgctgcttctaccgcggactcaacttcatctactgctacctcaacatcgacaacatcttcatcaagcacaagtgttagttcaaaaacgtccacgaaattggacacgaaaacttcaactagttcttctgctacgcactcatcctcttcctcgtctacaacctccactaccacttcctcttcagagacaactacttcctcctcttcttcatcctcttcctcttctacgtctactacttctactacttctactacctctagtactacttctacttcttcttctccttccaccacttcctctagcacttctgcctcttccagttcagaaacgtcctctacgcaggcaacttcttcatccaccacatcgacctcatcctcaacttcgacagcaacggtcacttctaccccctcatcgacttcaataggtacttccacgcattacactacccgtgtggtgacgcagtccgtggtttctcaagctaaccaacaagcaagcacgatctttaccaccaggacctctgtttatgcaacagtatcgtctacgtcctcctctactagttctctcttaaacgggaaatcgagctcgtccaagagcaaaggcttgagtggtggcgccatcgcaggtgtcgtagtaggtgtggtttgtggtacagttgccttgttggctctggcgttattctttttcgtatggaaaaaacgtcgccaatcttctcagcatgtggacttggaagagacaaagcagtaccagccgtactcactgggtgatgctgacgctaaccctgttattccaccgtctgcttcgagcactaactggcacataccctctaggaataatacagcattgtccaagaatacagcgtctacttttgccacttatgatctgccgacaagggcgccgggcggcagagattctattattactggtgatgcacataatatcagcaaaagaagtcactttccctcggtagtgtacgaggagcctccttcgatctataacgggaaccaaaggttcagtgctacttcgctgcccgatatgatggaagaaagacaactacacattgtcaaccccgataatgtgagttcaaatattgggagtaatgtctcagatggtgatgatgattacgatgatgcaaaggattccaataatagttctttgcgctga

SEQ ID NO: 424 - protein, 503 aa, Saccharomyces cerevisiae
MHLDLIHKSFILVWLIYIRAALADQFTYKACYSASDIRKLGLTYKGVYEYQSVSYCQNECPGQAVVALFNGTGCYCGGSVAQLQSLTQVDSSKCDVSCAGWPYQNCGGSSAMNVYINNAASTADSTSSTATSTSTTSSSSTSVSSKTSTKLDTKTSTSSSATHSSSSSSTTSTTTSSSETTTSSSSSSSSSSTSTTSTTSTTSSTTSTSSSPSTTSSSTSASSSSETSSTQATSSSTTSTSSSTSTATVTSTPSSTSIGTSTHYTTRVVTQSVVSQANQQASTIFTTRTSVYATVSSTSSSTSSLLNGKSSSSKSKGLSGGAIAGVVVGVVCGTVALLALALFFFVWKKRRQSSQHVDLEETKQYQPYSLGDADANPVIPPSASSTNWHIPSRNNTALSKNTASTFATYDLPTRAPGGRDSIITGDAHNISKRSHFPSVVYEEPPSIYNGNQRFSATSLPDMMEERQLHIVNPDNVSSNIGSNVSDGDDDYDDAKDSNNSSLR

SEQ ID NO: 425 - DNA, 1671 bp, Saccharomyces cerevisiae
atggaaagagtatggtttgcaaaattaacaaataaaggaactattaaaatcgggtatatctcatttatacttctaagtttgctatgtcaatctctgattgggctggttaatgctgattttaattatgaaggctgttacagtgccgcggatatccagtctgctggactgtctctgaaaaactcatacatatatcaatcagtgtcatactgtcaaaaccagtgccctgagtcagcagtagtagcattatttaacgggtcagattgttactgcggtaattcggtaagttttctgacttctttgacgaaatcaacagattcaaactgtggaactaaatgctctggctggccttaccaaatgtgtggagggtcatcgtacatgaacgtgtatgtaaatgctgaaacttttgtttcatcggttgaatcttcctcttccaaagaagggtctagcacttcctatatgccctcaacaacttcttcattgtcctccgcccaaatttcttcaactactaggagaacgtcaacagatatgaaaagttctgaaatgatagccacgacagtttctaccacttcaacaacctcttcctcgacttcctctactacctcttctaccacctcttctaccacctcttctaccacctcttctactacctcttcctcgacttcctctactacctcttctaccacctcttctaccacctcttctaccacctcttctaccacctcttctactacctcttctactacctcctctactacctcctctactacctctatcttttctgttacgtctagctcctcatccattacattgtcctcatctgagcataccacagtcgatagccgtacttcttcaccctcttccaccttggtgccagtgtcctcgagtagcagcacactatcaactccaaaagtgacctcaatgacccctagtacgtcatcaacgataccaatagttacctcagtggaactagtgactagtgtggttacaaaagcgatcgtgagtacttctgatcaacatcaggaaacaatatttgttacgaggacatccgtggttgaacgatcttctgaggtagctactgctactgctgccgcctcaaataatagatctaattcgacttcgaagcagcgtctgagtggtggagccattgccggtattgttattggtgttgtgtttggcgtaatttttattattttgattctattgttcctgatatggaggagacggaaatcgcacgaccaattagacttggaggaaacgaaacattatcagccctattcgttcggtgatgaggatgcaaatccaataggaccgcctccctcctctggtacgacaaattggatgagacattcaaggggtaatacagcgggttctatcggtacaagtaatatgtatggtttttctatgagtaatggtgcaaattatagtagtcctagttcaaacaccagtggaagcatcataaacaacttggctggcttacaagatgctacggttcagaaacagaaccttccatcgacagtttttgaagaggcaaatactttgaatagtgcaaatgaaaggttcagtgccaattctttacccgacatgatgatgagcggaccattgcaagtggtaaaccctgataatcctgataatcctgaattatctagtaccgtatctcataatcgagcctga

SEQ ID NO: 426 - protein, 556 aa, Saccharomyces cerevisiae
MERVWFAKLTNKGTIKIGYISFILLSLLCQSLIGLVNADFNYEGCYSAADIQSAGLSLKNSYIYQSVSYCQNQCPESAVVALFNGSDCYCGNSVSFLTSLTKSTDSNCGTKCSGWPYQMCGGSSYMNVYVNAETFVSSVESSSSKEGSSTSYMPSTTSSLSSAQISSTTRRTSTDMKSSEMIATTVSTTSTTSSSTSSTTSSTTSSTTSSTTSSTTSSSTSSTTSSTTSSTTSSTTSSTTSSTTSSTTSSTTSSTTSIFSVTSSSSSITLSSSEHTTVDSRTSSPSSTLVPVSSSSSTLSTPKVTSMTPSTSSTIPIVTSVELVTSVVTKAIVSTSDQHQETIFVTRTSVVERSSEVATATAAASNNRSNSTSKQRLSGGAIAGIVIGVVFGVIFIILILLFLIWRRRKSHDQLDLEETKHYQPYSFGDEDANPIGPPPSSGTTNWMRHSRGNTAGSIGTSNMYGFSMSNGANYSSPSSNTSGSIINNLAGLQDATVQKQNLPSTVFEEANTLNSANERFSANSLPDMMMSGPLQVVNPDNPDNPELSSTVSHNRA

SEQ ID NO: 427 - DNA, 1818 bp, Saccharomyces cerevisiae
atgcagacgtcaatggtgagcgcaaaagttagtatatggctagtatgtagcgttatatgcagtagcctggtacgggctacgcaatctgtgtgttcgtcgcaaaacacagcgaccactgacggtgtacgaaatcaatttcagagtaatggttggtgttcaaataactgtgctggtcatcagtttgccatcgtacaggggttcatgtgctggtgcagtgattcggaaccgagcactcagacatcggtgggagactgcagtggcacttgtcccggttatggctacgaagattgtggtaatgcggataaggatctttttggttatatatatctggggcaaaccccgctaagttctgtacagagtgtggaaacgtcaacagagtccagtgtgtacgtttcaagtagctctatcacgagtagtagtagtacgagtattgtggacacaaccacaatctcgccgactctgacgtcaacgagtacgaccccattgacaaccgcctcaaccagtacaacaccatcaactgatataacatcggcactgcccacgactacaagcacaaagttgtcaacatccattcccacaagcacgacatcgtcaacctctaccaccacaagtacctcatcgtcgacttctacgaccgtaagtgtcacatcatcaacatctaccaccacaagtactacgtcgtcaaccctcatttccacgagcacatcatcatcatcatcatcaactccaaccacaacatcgtcagcccccatttctacaagcacgacgtcgtcaacttccacttcaacaagtacaacatcgccaacttcttcttcagcacctacaagctcgtctaatacaacaccaacgagcacaacgttcactacgacatcacccagtacagccccttcaagcactacggttacttacaccagtaccacagcatctccaataacgtccactataacttctgtaaacctgcagacctccttaaagtattctgtgataacagtgacttcagtgcacaccatggacactaacatttcggaaatcacctcgagatatctcaccatgaaaaaagtaataacgcagatttactcttccaccctcggggctactcctacttctgcagtggctactacgtctgccagcgtaggtggtagaataacaaacaataacaatagtaacaccaccaacagcaatacaccaactaacaagtctacagaaaagaaagggtactgggattcgcccgggaaaatagccgctactttcgtcgtggttggagtggtatgtttggtaattatatgcatactaatatacttaatacatcattatagaacaagacccgctcggaaggctcaagattttgagaatgaatatcagagtaagttttaccagtccaagtacccaaatgaagttaccactaccacgttacacacgccttcaccatcttcaaattcaactttctcgaccccaagattaatatacactgatgaaaagggacaaattatgtctgaatcaccatccccacgtcaatctacgtattccttgactgcaggcagtccaccaaatgacccaagcacgttggcaagcccatttcacgatcccattcttcccagaagaacttctacttttcttcattcgcccattcaaaagcaacacgaaaaaatggaatcaaacgttactctaggtgaagacacggtactggtggatcagaggctagacccaagtaagatgcttaacactttagcaaatgacgatgccacaaaccactctaccatttcgttatcagacaacgtagactactccaggagggttctgcggctaatgaacgaataa

SEQ ID NO: 428 - protein, 605 aa, Saccharomyces cerevisiae
MQTSMVSAKVSIWLVCSVICSSLVRATQSVCSSQNTATTDGVRNQFQSNGWCSNNCAGHQFAIVQGFMCWCSDSEPSTQTSVGDCSGTCPGYGYEDCGNADKDLFGYIYLGQTPLSSVQSVETSTESSVYVSSSSITSSSSTSIVDTTTISPTLTSTSTTPLTTASTSTTPSTDITSALPTTTSTKLSTSIPTSTTSSTSTTTSTSSSTSTTVSVTSSTSTTTSTTSSTLISTSTSSSSSSTPTTTSSAPISTSTTSSTSTSTSTTSPTSSSAPTSSSNTTPTSTTFTTTSPSTAPSSTTVTYTSTTASPITSTITSVNLQTSLKYSVITVTSVHTMDTNISEITSRYLTMKKVITQIYSSTLGATPTSAVATTSASVGGRITNNNNSNTTNSNTPTNKSTEKKGYWDSPGKIAATFVVVGVVCLVIICILIYLIHHYRTRPARKAQDFENEYQSKFYQSKYPNEVTTTTLHTPSPSSNSTFSTPRLIYTDEKGQIMSESPSPRQSTYSLTAGSPPNDPSTLASPFHDPILPRRTSTFLHSPIQKQHEKMESNVTLGEDTVLVDQRLDPSKMLNTLANDDATNHSTISLSDNVDYSRRVLRLMNE

SEQ ID NO: 429 - DNA, 1953 bp, Saccharomyces cerevisiae
atgagtgtgtctaccgccaagaggtcgctggatgtcgtttctccgggttcattagcggagtttgagggttcaaaatctcgtcacgatgaaatagaaaatgaacatagacgtactggtacacgtgatggcgaggatagcgagcaaccgaagaagaagggtagcaaaactagcaaaaagcaagatttggatcctgaaactaagcagaagaggactgcccaaaatcgggccgctcaaagagcttttagggaacgtaaggagaggaagatgaaggaattggagaagaaggtacaaagtttagagagtattcagcagcaaaatgaagtggaagctacttttttgagggaccagttaatcactctggtgaatgagttaaaaaaatatagaccagagacaagaaatgactcaaaagtgctggaatatttagcaaggcgagatcctaatttgcatttttcaaaaaataacgttaaccacagcaatagcgagccaattgacacacccaatgatgacatacaagaaaatgttaaacaaaagatgaatttcacgtttcaatatccgcttgataacgacaacgacaacgacaacagtaaaaatgtggggaaacaattaccttcaccaaatgatccaagtcattcggctcctatgcctataaatcagacacaaaagaaattaagtgacgctacagattcctccagcgctactttggattccctttcaaatagtaacgatgttcttaataacacaccaaactcctccacttcgatggattggttagataatgtaatatatactaacaggtttgtgtcaggtgatgatggcagcaatagtaaaactaagaatttagacagtaatatgttttctaatgactttaattttgaaaaccaatttgatgaacaagtttcggagttttgttcgaaaatgaaccaggtatgtggaacaaggcaatgtcccattcccaagaaacccatctcggctcttgataaagaagttttcgcgtcatcttctatactaagttcaaattctcctgctttaacaaatacttgggaatcacattctaatattacagataatactcctgctaatgtcattgctactgatgctactaaatatgaaaattccttctccggttttggccgacttggtttcgatatgagtgccaatcattacgtcgtgaatgataatagcactggtagcactgatagcactggtagcactggcaataagaacaaaaagaacaataataatagcgatgatgtactcccattcatatccgagtcaccgtttgatatgaaccaagttactaatttttttagtccgggatctaccggcatcggcaataatgctgcctctaacaccaatcccagcctactgcaaagcagcaaagaggatataccttttatcaacgcaaatctggctttcccagacgacaattcaactaatattcaattacaacctttctctgaatctcaatctcaaaataagtttgactacgacatgttttttagagattcatcgaaggaaggtaacaatttatttggagagtttttagaggatgacgatgatgacaaaaaagccgctaatatgtcagacgatgagtcaagtttaatcaagaaccagttaattaacgaagaaccagagcttccgaaacaatatctacaatcggtaccaggaaatgaaagcgaaatctcacaaaaaaatggcagtagtttacagaatgctgacaaaatcaataatggcaatgataacgataatgataatgatgtcgttccatctaaggaaggctctttactaaggtgttcggaaatttgggatagaataacaacacatccgaaatactcagatattgatgtcgatggtttatgttccgagctaatggcaaaggcaaaatgttcagaaagaggggttgtcatcaatgcagaagacgttcaattagctttgaataagcatatgaactaa

SEQ ID NO: 430 - protein, 650 aa, Saccharomyces cerevisiae
MSVSTAKRSLDVVSPGSLAEFEGSKSRHDEIENEHRRTGTRDGEDSEQPKKKGSKTSKKQDLDPETKQKRTAQNRAAQRAFRERKERKMKELEKKVQSLESIQQQNEVEATFLRDQLITLVNELKKYRPETRNDSKVLEYLARRDPNLHFSKNNVNHSNSEPIDTPNDDIQENVKQKMNFTFQYPLDNDNDNDNSKNVGKQLPSPNDPSHSAPMPINQTQKKLSDATDSSSATLDSLSNSNDVLNNTPNSSTSMDWLDNVIYTNRFVSGDDGSNSKTKNLDSNMFSNDFNFENQFDEQVSEFCSKMNQVCGTRQCPIPKKPISALDKEVFASSSILSSNSPALTNTWESHSNITDNTPANVIATDATKYENSFSGFGRLGFDMSANHYVVNDNSTGSTDSTGSTGNKNKKNNNNSDDVLPFISESPFDMNQVTNFFSPGSTGIGNNAASNTNPSLLQSSKEDIPFINANLAFPDDNSTNIQLQPFSESQSQNKFDYDMFFRDSSKEGNNLFGEFLEDDDDDKKAANMSDDESSLIKNQLINEEPELPKQYLQSVPGNESEISQKNGSSLQNADKINNGNDNDNDNDVVPSKEGSLLRCSEIWDRITTHPKYSDIDVDGLCSELMAKAKCSERGVVINAEDVQLALNKHMN

SEQ ID NO: 431 - DNA, 666 bp, Saccharomyces cerevisiae
atgggccaaaaaagtagtaaagtgcatataaccaaaacagatagggcgatcctagaagtaaaacgatctaaagatgaaattcataagtttacgaggaggacagataatttgattttggtagagaagagtcaactaaaagacctaatacgaaaaaatcctgaaaattataaatctaacatgaaggtacgatttctactaaaaagaattcattatcaggagcatttgttgcagcaggcttcggatcagcttattaatttggaaaatatggtgtcaacacttgagttcaaaatggtagaaaagcaatttattaatggactgaaaaatggaaatgaaatcttgaaaaaactaaacaaggaatttagcaatgttgatgaactgatggacgatgtacaagatcaaattgcgtatcaaaatgaaattaacgagacattatctagaagcttagtcggaacaagcaattatgaagacgatctagataaggaattggatgctctagaaagtgaactcaatccagagaagatgaataacgcaaaagtagctaacatgccatcaacagaaggtttgccatcattgcctcaaggagaacaaaccgagcaaaaagaaagagaggaattcgcgacggaggagagatcagacactaaggaacctttagcattactatcctga

SEQ ID NO: 432 - protein, 221 aa, Saccharomyces cerevisiae
MGQKSSKVHITKTDRAILEVKRSKDEIHKFTRRTDNLILVEKSQLKDLIRKNPENYKSNMKVRFLLKRIHYQEHLLQQASDQLINLENMVSTLEFKMVEKQFINGLKNGNEILKKLNKEFSNVDELMDDVQDQIAYQNEINETLSRSLVGTSNYEDDLDKELDALESELNPEKMNNAKVANMPSTEGLPSLPQGEQTEQKEREEFATEERSDTKEPLALLS

SEQ ID NO: 433 - DNA, 462 bp, Saccharomyces cerevisiae
atgtctcaaaaagcttgttacgtttgcggtaagattggccatttggcagaagactgtgattctgaaagactatgttacaactgtaacaaacccggtcacgttcaaacggattgtaccatgccaagaacagttgaattcaagcaatgttacaattgtggtgaaaccggtcacgttagaagtgaatgtactgtgcaacgttgtttcaactgtaaccaaaccggccacatctccagagaatgccctgaaccaaagaagaccagcagattctccaaagtttcatgttataaatgtggtggtccaaaccatatggctaaggactgtatgaaagaggacggaattagtggattgaaatgttacacttgtggtcaagctggccacatgtccagggactgtcaaaatgacaggctttgttacaactgtaacgaaactggccatatttccaaggattgtccaaaggcttag

SEQ ID NO: 434 - protein, 153 aa, Saccharomyces cerevisiae
MSQKACYVCGKIGHLAEDCDSERLCYNCNKPGHVQTDCTMPRTVEFKQCYNCGETGHVRSECTVQRCFNCNQTGHISRECPEPKKTSRFSKVSCYKCGGPNHMAKDCMKEDGISGLKCYTCGQAGHMSRDCQNDRLCYNCNETGHISKDCPKA

SEQ ID NO: 435 - DNA, 504 bp, Saccharomyces cerevisiae
atgtctactattccctcagaaatcatcaattggaccatcttaaatgaaattatatctatggatgacgatgattccgatttttctaaaggtctaattattcaatttatcgaccaggcacaaacaacttttgctcaaatgcaacgacagctggacggtgaaaaaaatcttaccgaattagacaatctgggccattttttaaagggttcttctgctgcattaggcttacaaagaattgcctgggtttgtgaaagaattcaaaacttgggaagaaaaatggaacatttcttccccaacaagaccgaattggtcaacactctgagcgataaatcgattattaatggaatcaatattgatgaagatgacgaggaaataaagatacaagtggacgataaagacgaaaattccatatatctcatcttgatagcaaaagctttgaaccagtctaggttggagttcaaactggcgagaattgagttatctaaatattacaacacaaacctataa

SEQ ID NO: 436 - protein, 167 aa, Saccharomyces cerevisiae
MSTIPSEIINWTILNEIISMDDDDSDFSKGLIIQFIDQAQTTFAQMQRQLDGEKNLTELDNLGHFLKGSSAALGLQRIAWVCERIQNLGRKMEHFFPNKTELVNTLSDKSIINGINIDEDDEEIKIQVDDKDENSIYLILIAKALNQSRLEFKLARIELSKYYNTNL

SEQ ID NO: 437 - DNA, 939 bp, Saccharomyces cerevisiae
atgcctgctacgttaaagaattcttctgctacattaaaactaaatactggtgcctccattccagtgttgggtttcggcacttggcgttccgttgacaataacggttaccattctgtaattgcagctttgaaagctggatacagacacattgatgctgcggctatctatttgaatgaagaagaagttggcagggctattaaagattccggagtccctcgtgaggaaatttttattactactaagctttggggtacggaacaacgtgatccggaagctgctctaaacaagtctttgaaaagactaggcttggattatgttgacctatatctgatgcattggccagtgcctttgaaaaccgacagagttactgatggtaacgttctgtgcattccaacattagaagatggcactgttgacatcgatactaaggaatggaattttatcaagacgtgggagttgatgcaagagttgccaaagacgggcaaaactaaagccgttggtgtctctaatttttctattaacaacattaaagaattattagaatctccaaataacaaggtggtaccagctactaatcaaattgaaattcatccattgctaccacaagacgaattgattgccttttgtaaggaaaagggtattgttgttgaagcctactcaccatttgggagtgctaatgctcctttactaaaagagcaagcaattattgatatggctaaaaagcacggcgttgagccagcacagcttattatcagttggagtattcaaagaggctacgttgttctggccaaatcggttaatcctgaaagaattgtatccaattttaagattttcactctgcctgaggatgatttcaagactattagtaacctatccaaagtgcatggtacaaagagagtcgttgatatgaagtggggatccttcccaattttccaatga

SEQ ID NO: 438 - protein, 312 aa, Saccharomyces cerevisiae
MPATLKNSSATLKLNTGASIPVLGFGTWRSVDNNGYHSVIAALKAGYRHIDAAAIYLNEEEVGRAIKDSGVPREEIFITTKLWGTEQRDPEAALNKSLKRLGLDYVDLYLMHWPVPLKTDRVTDGNVLCIPTLEDGTVDIDTKEWNFIKTWELMQELPKTGKTKAVGVSNFSINNIKELLESPNNKVVPATNQIEIHPLLPQDELIAFCKEKGIVVEAYSPFGSANAPLLKEQAIIDMAKKHGVEPAQLIISWSIQRGYVVLAKSVNPERIVSNFKIFTLPEDDFKTISNLSKVHGTKRVVDMKWGSFPIFQ

SEQ ID NO: 439 - DNA, 2643 bp, Saccharomyces cerevisiae
atggatgcgttgactcccagggactcccccaagcgcgatgactcgatggccacgagtgcggccactgctgcttctgccaagcctgatgctctgacgataggtaaagaaggcattgtccacgggcacatccataactacaacaacctgacctatatccatggtcaccttcaccacagcgcgcctgtgaacgacagtagtgcttcggcaacacctgcagccgcagctgttgctgatgccgctacttccgcatttgcatctggagctagccatgatatgggtggtgattgccacgtcaatgagaaatgcaaggagtacaccgactgccaacatttcgagttcttgaattatcacaataatccgtcattaacaaaatataatgatactgcaacgtataattctaataatcattcttttgcaaacaatttccattcggtagcttctgatccgacaagtccccaacagaattctaaaagcgacctaccacgtagaaaagattcttggtttaacgacgatctgatactgctgccctcttccaagaaaaataaaccgaacccaccacctggatccgatgattgttattgtacgcccaagattttggaaatatgttgtgacgaaactcatcccaaaagtgaggctaatataaaacaaggtgaatctgatcaaccgacaaagaaagacatatctgagaacggcaatgatgttgcaatattcacagatgtaaagaacgatcacttgatgccaaattttaaccttcatgatcagtactgtaatagtaccaatcacgactctcacaatcacaataatactgtaccagatagcttttctcagctgatgtctcacttatcggagattgattgcgatttgacctgtgacaccccatgcacggctagcacgagcgcgactagtggtcacaagtttgttcaagatcatcaatcatcaaataatgatgacgttttccataaatactgcaaattttgtgaggagagcactgataatcaaccttgttctaagcatatgcatttagagtcaaagccacctcaactaccacccaaatgttcatctttacgaaaacctacaaacactttgcaaggtacaaatcatgcttatcacgaacatatcttaaatactgatatggatttgaagattttggaagatttatgcaatatttcttctttgtatgaagtaccgtttggaaaacacattaaccaccacgaccacaataatgccggtaacggctgcgatggttcgagcacaggaaataatgaaaacggtaaccaaacaatgaatcttctattatcaagcattaatagatgcaaccctaaaaataatcttaatggaagcaataacaatacggctggagcaacttcaactgatcatcaacaccatcaccatagaatacagtttcattctcacaaaccaaatagaaacaatattgtgaacaattcagggattagcgcggcgaacacaacagccgatctaactaacaacgatttaaatgacttaatttcaagagagtatagttatgaaagatttagaaatcaaagtgagcccccttcgctacccaaagtcactcatcagaatcagaaaaatcgtagatcttggcctacaaaagatctagaatctactgatttcagctctttggaagactcattaccttctagcatctctcctcctatacagacaacaagcactataaatttcaactggtgttttaaagaagagaaaaacaatgacttaaaatgcaaatggaaagaatgtcctgagtcttgtagctcactatttgacctacaaagacatcttttgaaggatcatgtctctcaagatttcaaacaccctatggaaccattagcttgtaattgggaggactgtgatttccttggagatgatacatgttccatagtgaaccatattaattgtcaacatggtatcaattttgatattcaatttgccaacccagactcatttttgcctggtagtatatcaaaggaaaaacatcacttactacattgccccaacccacaaacacacgaagtttctaaagcagatggagcacctgatatgacgtctgcaaatgatgtttccaatataccgccaatcaagcagccggaacaggtgatttgccaatgggatggttgcaataagtcattttccagtgctcaggaattaaacgaccatttagaagcagtacatttaacccggggtaagtctgaataccaatgcttgtggcatgactgccatcgtacgttcccccaaagacaaaaattaatccgtcatttaaaagtgcattcgaaatacaaaccttataagtgcaagacatgtaaaaggtgtttttcaagcgaagaaactttagttcagcataccaggacacactctggcgaaaaaccttacaaatgtcacatttgtaataaaaaattcgcgatttcaagttctttgaagattcatataagaacccatactggtgaaaaacctttacaatgcaagatttgtggtaagagattcaacgaatcgtcaaatttgagcaaacatattaagacccatcagaaaaaatacaagtgctctgactgttccaaaagctttgacgatttgggaaaattgaactcacagaaagtgaaatgcgcattggaaagaaaaccatatttataa

SEQ ID NO: 440 - protein, 880 aa, Saccharomyces cerevisiae [sequence omitted]

SEQ ID NO: 441 - DNA, 20 bp, Artificial Sequence
  Primer
acaaaaaagcaggctccaca

SEQ ID NO: 442 - DNA, 14 bp, Artificial Sequence
  Primer
acaagaaagctggt

SEQ ID NO: 443 - DNA, 29 bp, Artificial Sequence
  Primer
ggggacaagtttgtacaaaaaagcaggct

SEQ ID NO: 444 - DNA, 27 bp, Artificial Sequence
  Primer
gggaccactttgtacaagaaagctggt

SEQ ID NO: 445 - DNA, 20 bp, Artificial Sequence
  Primer
gtgcctgtagtaagacatgt

SEQ ID NO: 446 - DNA, 20 bp, Artificial Sequence
  Primer
acatgtcttactacaggcac

SEQ ID NO: 447 - DNA, 20 bp, Artificial Sequence
  Primer
gtaaagtgaatttgagaaac

SEQ ID NO: 448 - DNA, 20 bp, Artificial Sequence
  Primer
gtttctcaaattcactttac

SEQ ID NO: 449 - DNA, 1251 bp, Emericella nidulans; identical to SEQ ID NO: 79

SEQ ID NO: 450 - protein, 416 aa, Emericella nidulans; identical to SEQ ID NO: 80

SEQ ID NO: 451 - DNA, 2178 bp, Emericella nidulans
atgcgcttgtccgaccaagtatcgcccgctggccccgatccttcgcacgatatgaaccttgatgccacttcagatccaatgaatctggatgacttcatcgttccctttgattcgcctgccgaacactccgcgcatccttcggtcgatcgaaacttcgcagcgacacccactggatcaattcctattaaatcgcgcaaggaccacgcgatgacggattcatcgaccgccgcctcattcccccacccaccccaggatcagcgaacaaactccgagtttggatacgtcccccgtcgggtccgcaaaacgagcgtcgacgagcggcagttcttcgctggcctctctgttcctacccgcaagcgccctgccgaggcctcgccccaggttcccccggtgtccaacgctatgatggcgcacagctcggaactttcagcggcactgccagattactctctcgatcatcaccttctgcttttgctctttctggcaatggcacagtgggccccgccgacctcatcaccatcacacgcattccaacattccctacggctggatacgtatggcatcaacgaagaccacgggctcaattcggccgggccatatcagcaaaatttccatttttcgccgtcagattctccaatgactgcaggaaatcctttctcgagtctatatgcccagacgccgctcgcctcgtcgcttaactcaactgagttcttctcacccccgccttctggctaccagtctactgtgtcgaccccgcaaccgatttatgaaggggagcagtcgatattcttttctgatgcgccctccgcggaatcccacacccagcgccgcattcctaattatatccagcagcgtcagtcgaacctgtctgcatcgctgcagccccgttatatgtacaacatgtccaacggcgaatctcacccagggagcgcagttacggggccgccaaccactaatatgtctggattttcggtgccgcagcatgtcaacccatcacaggtgcttggccacggcgaattctccacaacggcgcctgccagcagcatgtttacctttggcggagattcagacaatgaggatgacgatggcaactttggtgaacgcggaggcattaccatgccaaatgactttgcctccttggatgagtctgttgatatgagcgccggtcttcattgggatggaggtttccccggatcagtacagtccctcccaggcttcagtgctcagacccgcaagcatgttacgattggatccacagacatgatagatggccctcttgaatggaatcagggaggtactcttggtcgtgcgcatggatccgctgcttcggtcagcgaggtgcgcaaccaaaaccaggaccctcgtcgctacgggaaggttcctcgtacagcatcgacccccaatgctgctgcactgctccgtcagagcttgaatggctcagccagcgggcttccgacaaaccacccatcaccaagcacccttccggagtccggtctcagcagtcggtgcctcccggccaggcagcctggtgggttgaagaacggtagcacgaacgcgggaccggagccagcctgcaccaactgtttcacccagaccacccctctctggagacgcaacccagagggccagcctctgtgcaatgcatgtggcctgttcctgaaactccatggcgtcgtcaggccactttcgctcaagactgatgtgatcaagaagcgaaaccgtagcagcgccaacacacttactgttggtacttctcggtcatctaagaaatcttcccgcaagaactccattcagcatgccccatccacatcgatatcctcccgtatgaacacttctgagtctccaccctcgatcaatggatccagcacgttggggaaacccggtgttgtgccaattgccgctgccccgcccaagtccggtcccccggctggcgtcgctcaggcccgtgctggtgtgcaagtagcacccagacggcagcgcagactcgaaaaagcaccagctggatccgaaccagatgcggacgacagccctaagtcagccgctcccccgagccggtccaaagtcgtgccattagctccggcgatggcaccacccgctgccgcaaacccagcgaaccacagtatcgccggtggacagggtgcgagtcaggaatgggagtggctgacaatgagtctgtag

SEQ ID NO: 452 - protein, 725 aa, Emericella nidulans
MRLSDQVSPAGPDPSHDMNLDATSDPMNLDDFIVPFDSPAEHSAHPSVDRNFAATPTGSIPIKSRKDHAMTDSSTAASFPHPPQDQRTNSEFGYVPRRVRKTSVDERQFFAGLSVPTRKRPAEASPQVPPVSNAMMAHSSELSAALPDYSLDHHLLLLLFLAMAQWAPPTSSPSHAFQHSLRLDTYGINEDHGLNSAGPYQQNFHFSPSDSPMTAGNPFSSLYAQTPLASSLNSTEFFSPPPSGYQSTVSTPQPIYEGEQSIFFSDAPSAESHTQRRIPNYIQQRQSNLSASLQPRYMYNMSNGESHPGSAVTGPPTTNMSGFSVPQHVNPSQVLGHGEFSTTAPASSMFTFGGDSDNEDDDGNFGERGGITMPNDFASLDESVDMSAGLHWDGGFPGSVQSLPGFSAQTRKHVTIGSTDMIDGPLEWNQGGTLGRAHGSAASVSEVRNQNQDPRRYGKVPRTASTPNAAALLRQSLNGSASGLPTNHPSPSTLPESGLSSRCLPARQPGGLKNGSTNAGPEPACTNCFTQTTPLWRRNPEGQPLCNACGLFLKLHGVVRPLSLKTDVIKKRNRSSANTLTVGTSRSSKKSSRKNSIQHAPSTSISSRMNTSESPPSINGSSTLGKPGVVPIAAAPPKSGPPAGVAQARAGVQVAPRRQRRLEKAPAGSEPDADDSPKSAAPPSRSKVVPLAPAMAPPAAANPANHSIAGGQGASQEWEWLTMSL

SEQ ID NO: 453 - DNA, 798 bp, Penicillium chrysogenum
atgacggagaaccacaccccttctactacgcagccgacgttgcctgcgcctgttgctgaagccgcgccgatccaagcaaacccggctccttctgcctcagtcacggcgactgctgccgccgctactgcggcggtgaacaacgccccctctatgaacggcgccggtgagcagttgccttgccagtgggttggttgcacggagaagtcccccactgccgagtctctatatgagcatgtttgcgagcgtcatgttggacgtaaaagcaccaacaacctcaacctgacctgccagtggggcacttgcaacaccacaacagtcaagcgtgatcatatcacctcccacatccgcgttcatgtgccacttaagccgcacaaatgcgacttttgtggtaaggctttcaagcgcccccaggatttgaagaagcatgtcaagactcatgcggacgactccgagatccgctcccccgaaccgggcatgaagcaccctgatatgatgttcccccaaaaccctaggggttcccctgctgccacacattacttcgaaagccctatcaacggcatcaatgggcaatattcacatgcaccgcctccccagtactaccagccacaccccccaccccaggctcccaacccgcattcctacggcaatctatactatgccctgagccaaggacaagagggaggccacccctacgaccgtaagcgcggatatgacgcgttgaacgaattttttggcgacttgaagcgccgccagttcgaccctaattcctatgccgcggtcggccagcgtctgctgtag

SEQ ID NO: 454 - protein, 265 aa, Penicillium chrysogenum
MTENHTPSTTQPTLPAPVAEAAPIQANPAPSASVTATAAAATAAVNNAPSMNGAGEQLPCQWVGCTEKSPTAESLYEHVCERHVGRKSTNNLNLTCQWGTCNTTTVKRDHITSHIRVHVPLKPHKCDFCGKAFKRPQDLKKHVKTHADDSEIRSPEPGMKHPDMMFPQNPRGSPAATHYFESPINGINGQYSHAPPPQYYQPHPPPQAPNPHSYGNLYYALSQGQEGGHPYDRKRGYDALNEFFGDLKRRQFDPNSYAAVGQRLL

SEQ ID NO: 455 - DNA, 1071 bp, Emericella nidulans
atggggtcgtgtttcagttcagaatcagcaggagatgtggaacagaagaagagaagccaggcaatcgaccggaaactagaagaggactcaaggcgtctacggcgagagtgcaagatcctgctactcggatctggagaaagcggtaaatcaacgattgtgaagcagatgaaaatcattcatcagaacggatatacggtcgaagagctggcgctgtatcgactcacagtctacaaaaatctccttgaatgcgcgaaagctttaataggagcctaccaccagtttaacctcgaacctacaagccagaaagtccgcgacaatatcgagtttctcgccaattacaacattgacccagatcccaatatacctctagatcccgcggtaggggatgccataacctatatctggaatgatccgtgcacatcaacagcactagaaagacagaatgagttctacttgatggattcggcgccttatttctttgaggaagcgaagcgcataacgtcaccagattatataccaaacgttaatgatgtgctgcgcgcaagaaccaagacgacgggtatctatgagacacgctttacgatgggccaattaagcattcacatgtttgatgttggcggccagcgcagcgagaggaaaaagtggattcactgcttcgaaaatgtcacgtctattatcttctgcgtggcattaagcgaatacgatcaagtactattggaagagggaaaccagaaccgaatgatggagagtctggtactctttgactccgtcgtcaactctcgatggttcatgcgaacaagtatcatccttttcctgaacaaggtggatcttttccgacaaaagttacctcgctccccgttgagcaactactttccagattactcagggggcaacgatgtgaaccgagccgcgaaatatctcctctggaggtttaatcaggtcaacagggcgcacctgaacttataccctcacttgacacaagctaccgatacaacgaatatccgactagtatttgccgccgtaaaggagaccattctgcaaaatgctttgaaagactcggggatcctgtaa

SEQ ID NO: 456 - protein, 356 aa, Emericella nidulans
MGSCFSSESAGDVEQKKRSQAIDRKLEEDSRRLRRECKILLLGSGESGKSTIVKQMKIIHQNGYTVEELALYRLTVYKNLLECAKALIGAYHQFNLEPTSQKVRDNIEFLANYNIDPDPNIPLDPAVGDAITYIWNDPCTSTALERQNEFYLMDSAPYFFEEAKRITSPDYIPNVNDVLRARTKTTGIYETRFTMGQLSIHMFDVGGQRSERKKWIHCFENVTSIIFCVALSEYDQVLLEEGNQNRMMESLVLFDSVVNSRWFMRTSIILFLNKVDLFRQKLPRSPLSNYFPDYSGGNDVNRAAKYLLWRFNQVNRAHLNLYPHLTQATDTTNIRLVFAAVKETILQNALKDSGIL

SEQ ID NO: 457 - DNA, 1071 bp, Aspergillus nidulans
atggggtcgtgtttcagttcagaatcagcaggagatgtggaacagaagaagagaagccaggcaatcgaccggaaactagaagaggactcaaggcgtctacggcgagagtgcaagatcctgctactcggatctcgagaaagcggtaaatcaacgattgtgaagcagatgaaaatcattcatcagaacggatatacggtcgaagagctggcgctgtatcgactcacagtctacaaaaatctccttgaatgcgcgaaagctttaataggagcctaccaccagtttaacctcgaacctacaagccagaaagtccgcgacaatatcgagtttctcgccaattacaacattgacccagatcccaatatacctctagatcccgcggtaggggatgccataacctatatctggaatgatccgtgcacatcaacagcactagaaagacagaatgagttctacttgatggattcggcgccttatttctttgaggaagcgaagcgcataacgtcaccagattatataccaaacgttaatgatgtgctgcgcgcaagaaccaagacgacgggtatctatgagacacgctttacgatgggccaattaagcattcacatgtttgatgttggcggccagcgcagcgagaggaaaaagtggattcactgcttcgaaaatgtcacgtctattatcttctgcgtggcattaagcgaatacgatcaagtactattggaagagggaaaccagaaccgaatgatggagagtctggtactctttgactccgtcgtcaactctcgatggttcatgcgaacaagtatcatccttttcctgaacaaggtggatcttttccgacaaaagttacctcgctccccgttgagcaactactttccagattactcagggggcaacgatgtgaaccgagccgcgaaatatctcctctggaggtttaatcaggtcaacagggcgcacctgaacttataccctcacttgacacaagctaccgatacaacgaatatccgactagtatttgccgccgtaaaggagaccattctgcaaaatgctttgaaagactcggggatcctgtaa

SEQ ID NO: 458 - protein, 356 aa, Aspergillus nidulans
MGSCFSSESAGDVEQKKRSQAIDRKLEEDSRRLRRECKILLLGSRESGKSTIVKQMKIIHQNGYTVEELALYRLTVYKNLLECAKALIGAYHQFNLEPTSQKVRDNIEFLANYNIDPDPNIPLDPAVGDAITYIWNDPCTSTALERQNEFYLMDSAPYFFEEAKRITSPDYIPNVNDVLRARTKTTGIYETRFTMGQLSIHMFDVGGQRSERKKWIHCFENVTSIIFCVALSEYDQVLLEEGNQNRMMESLVLFDSVVNSRWFMRTSIILFLNKVDLFRQKLPRSPLSNYFPDYSGGNDVNRAAKYLLWRFNQVNRAHLNLYPHLTQATDTTNIRLVFAAVKETILQNALKDSGIL

SEQ ID NO: 459 - DNA, 1071 bp, Neurospora crassa
atgggcgcatgcatgagcaagaacgacgaggagacggagcagaagaagaggagccagaagatcgatcgcgacctagaggaggactccaagaagctacggaaagaatgcaagattctacttttgggctccggcgagagcggtaaatcgaccattgtgaagcagatgaagatcatacatctcaagggctattcagatgaggagctcacaaattaccgaccaaccgtctacaagaatctgttggaatgcgcaaaggcggttgtgaatgctatgcaccagtttgatatccagccagcagatccgtcgctacggccctacgtcgagttcttgcaggactacaacatggaggggtgtccaccaggacagtcgatagaccccaaagtcggcacagctatccaggcactatggaatgatccagcaaaggagcaactcatggagaggcaaacagagttctatcttatggactctgcagaatatttcttcaccgaggtcatgaggattgtggccgaagactaccgaccaaatgaaatggatgtacttcgcgccagaacaaagacgacgggtatctacgagacaagattcaagatggggcagctcagtatccacatgtttgatgtgggcgggcaacgtagtgaacgcaagaagtggattcactgcttcgaaaacgtcacatccatcatcttctgtgttgccctgagcgagtacgaccaagtattgctcgaggagagcagtcagaaccgcatgatggagagtctgctgctcttcgattcggtcgtcaattcacggtggtttatgagaacgagtatcatcctgtttctcaacaaggtcgacatcttcaagcagaaactggggcggtcacctctagggaactatttcccggattattccggtggaaacgacgtcaacaaggccgccaagtatctattgtggcggtttaaccaggttaacagggctcaccttaacctatatcctcacttgacacaagccaccgatacctccaacatccgtctcgtgtttgctgccgtcaaggaaaccattctcaataacgcccttaaagactccggtattctatga

SEQ ID NO: 460 - protein, 356 aa, Neurospora crassa
MGACMSKNDEETEQKKRSQKIDRDLEEDSKKLRKECKILLLGSGESGKSTIVKQMKIIHLKGYSDEELTNYRPTVYKNLLECAKAVVNAMHQFDIQPADPSLRPYVEFLQDYNMEGCPPGQSIDPKVGTAIQALWNDPAKEQLMERQTEFYLMDSAEYFFTEVMRIVAEDYRPNEMDVLRARTKTTGIYETRFKMGQLSIHMFDVGGQRSERKKWIHCFENVTSIIFCVALSEYDQVLLEESSQNRMMESLLLFDSVVNSRWFMRTSIILFLNKVDIFKQKLGRSPLGNYFPDYSGGNDVNKAAKYLLWRFNQVNRAHLNLYPHLTQATDTSNIRLVFAAVKETILNNALKDSGIL

SEQ ID NO: 461 - DNA, 1071 bp, Neurospora crassa
atgggcgcatgcatgagcaagaacgacgaggagacggagcagaagaagaggagccagaagatcgatcgcgacctagaggaggactccaagaagctacggaaagaatgcaagattctacttttgggctcccgcgagagcggtaaatcgaccattgtgaagcagatgaagatcatacatctcaagggctattcagatgaggagctcacaaattaccgaccaaccgtctacaagaatctgttggaatgcgcaaaggcggttgtgaatgctatgcaccagtttgatatccagccagcagatccgtcgctacggccctacgtcgagttcttgcaggactacaacatggaggggtgtccaccaggacagtcgatagaccccaaagtcggcacagctatccaggcactatggaatgatccagcaaaggagcaactcatggagaggcaaacagagttctatcttatggactctgcagaatatttcttcaccgaggtcatgaggattgtggccgaagactaccgaccaaatgaaatggatgtacttcgcgccagaacaaagacgacgggtatctacgagacaagattcaagatggggcagctcagtatccacatgtttgatgtgggcgggcaacgtagtgaacgcaagaagtggattcactgcttcgaaaacgtcacatccatcatcttctgtgttgccctgagcgagtacgaccaagtattgctcgaggagagcagtcagaaccgcatgatggagagtctgctgctcttcgattcggtcgtcaattcacggtggtttatgagaacgagtatcatcctgtttctcaacaaggtcgacatcttcaagcagaaactggggcggtcacctctagggaactatttcccggattattccggtggaaacgacgtcaacaaggccgccaagtatctattgtggcggtttaaccaggttaacagggctcaccttaacctatatcctcacttgacacaagccaccgatacctccaacatccgtctcgtgtttgctgccgtcaaggaaaccattctcaataacgcccttaaagactccggtattctatga

SEQ ID NO: 462 - protein, 356 aa, Neurospora crassa
MGACMSKNDEETEQKKRSQKIDRDLEEDSKKLRKECKILLLGSRESGKSTIVKQMKIIHLKGYSDEELTNYRPTVYKNLLECAKAVVNAMHQFDIQPADPSLRPYVEFLQDYNMEGCPPGQSIDPKVGTAIQALWNDPAKEQLMERQTEFYLMDSAEYFFTEVMRIVAEDYRPNEMDVLRARTKTTGIYETRFKMGQLSIHMFDVGGQRSERKKWIHCFENVTSIIFCVALSEYDQVLLEESSQNRMMESLLLFDSVVNSRWFMRTSIILFLNKVDIFKQKLGRSPLGNYFPDYSGGNDVNKAAKYLLWRFNQVNRAHLNLYPHLTQATDTSNIRLVFAAVKETILNNALKDSGIL

SEQ ID NO: 463 - DNA, 1071 bp, Neurospora crassa
atgggcgcatgcatgagcaagaacgacgaggagacggagcagaagaagaggagccagaagatcgatcgcgacctagaggaggactccaagaagctacggaaagaatgcaagattctacttttgggctccggcgagagcggtaaatcgaccattgtgaagcagatgaagatcatacatctcaagggctattcagatgaggagctcacaaattaccgaccaaccgtctacaagaatctgttggaatgcgcaaaggcggttgtgaatgctatgcaccagtttgatatccagccagcagatccgtcgctacggccctacgtcgagttcttgcaggactacaacatggaggggtgtccaccaggacagtcgatagaccccaaagtcggcacagctatccaggcactatggaatgatccagcaaaggagcaactcatggagaggcaaacagagttctatcttatggactctgcagaatatttcttcaccgaggtcatgaggattgtggccgaagactaccgaccaaatgaaatggatgtacttcgcgccagaacaaagacgacgggtatctacgagacaagattcaagatggggcagctcagtatccacatgtttgatgtgggcgcgcaacgtagtgaacgcaagaagtggattcactgcttcgaaaacgtcacatccatcatcttctgtgttgccctgagcgagtacgaccaagtattgctcgaggagagcagtcagaaccgcatgatggagagtctgctgctcttcgattcggtcgtcaattcacggtggtttatgagaacgagtatcatcctgtttctcaacaaggtcgacatcttcaagcagaaactggggcggtcacctctagggaactatttcccggattattccggtggaaacgacgtcaacaaggccgccaagtatctattgtggcggtttaaccaggttaacagggctcaccttaacctatatcctcacttgacacaagccaccgatacctccaacatccgtctcgtgtttgctgccgtcaaggaaaccattctcaataacgcccttaaagactccggtattctatga

SEQ ID NO: 464 - protein, 356 aa, Neurospora crassa
MGACMSKNDEETEQKKRSQKIDRDLEEDSKKLRKECKILLLGSGESGKSTIVKQMKIIHLKGYSDEELTNYRPTVYKNLLECAKAVVNAMHQFDIQPADPSLRPYVEFLQDYNMEGCPPGQSIDPKVGTAIQALWNDPAKEQLMERQTEFYLMDSAEYFFTEVMRIVAEDYRPNEMDVLRARTKTTGIYETRFKMGQLSIHMFDVGAQRSERKKWIHCFENVTSIIFCVALSEYDQVLLEESSQNRMMESLLLFDSVVNSRWFMRTSIILFLNKVDIFKQKLGRSPLGNYFPDYSGGNDVNKAAKYLLWRFNQVNRAHLNLYPHLTQATDTSNIRLVFAAVKETILNNALKDSGIL

SEQ ID NO: 465 - DNA, 1062 bp, Emericella nidulans
atgggttgtggaatgagtaccgaggataaggagggcaaggcccgcaacgaggagattgagaaccagctcaagcgggacaagatgatgcagagaaatgagattaaaatgctcctgctcggtgcgcgagagtctggcaagtctacaattcttaagcagatgaagttgatccacgagggtggctactcccgcgatgagagggagtcttttaaggaaattatctacagcaacaccgtccagtcgatgcgtgtcatcctggaagccatggagtcactggagctgcctctggaagatgctcgtaacgaatatcacgtccagaccgttttcatgcaacccgctcagatcgaaggcgacagcttgccctcagaagttggtaatgccattgctgccctctggcaggatgctggtgttcaggagtgtttcaagcgatctcgtgaataccaactcaacgactccgccaaatactactttgactctatcgagcgtattgcccagagcgactaccttcccacggaccaggatgtcctacgctcacgtgtcaagaccactggtatcaccgagacgaccttcattatcggcgatctgacctatcgaatgttcgacgttggtggtcagcgttctgagcgaaagaagtggattcactgcttcgagaacgtcaccaccattcttttcctggtcgccatttccgaatacgaccagctgcttttcgaagatgagactgtaaaccgtatgcaggaagctctcactctgttcgactccatttgcaactcccgctggttcgtcaagacctcgattattctcttccttaacaagatcgaccgctttaaggagaagctccctgtcagccccatgaagaactacttccccgactacgagggtggtgctgactacgccgctgcctgcgactacatactcaaccgcttcgtctctctgaaccaagcagagcagaagcagatctacacacatttcacatgcgccacagacacgacacagatccgatttgtcatggcagctgtaaatgatattattatccaagagaacctgagactctgtggtctgatttaa

SEQ ID NO: 466 - protein, 353 aa, Emericella nidulans
MGCGMSTEDKEGKARNEEIENQLKRDKMMQRNEIKMLLLGARESGKSTILKQMKLIHEGGYSRDERESFKEIIYSNTVQSMRVILEAMESLELPLEDARNEYHVQTVFMQPAQIEGDSLPSEVGNAIAALWQDAGVQECFKRSREYQLNDSAKYYFDSIERIAQSDYLPTDQDVLRSRVKTTGITETTFIIGDLTYRMFDVGGQRSERKKWIHCFENVTTILFLVAISEYDQLLFEDETVNRMQEALTLFDSICNSRWFVKTSIILFLNKIDRFKEKLPVSPMKNYFPDYEGGADYAAACDYILNRFVSLNQAEQKQIYTHFTCATDTTQIRFVMAAVNDIIIQENLRLCGLI

SEQ ID NO: 467 - DNA, 1062 bp, Emericella nidulans
atgggttgcggaatgagtacagaggagaaggagggcaaggcccggaacgaggagattgagaaccagctcaagagggatcgcatgcaacaacgcaatgagatcaagatgcttcttctgggtgctcgtgaatccggaaagtcgaccatcttgaagcagatgaagcttatccacgaaggaggttactcgcgcgacgagcgcgagtcgttcaaggaaatcatcttcagcaacactgtgcagtccatgcgtgtcattctcgaggccatggagtccctagagttgccactcgccgatcagcgcgtcgagtaccatgtccagaccatcttcatgcagcccgctcaaatagaaggtgacgtgctgcctcctgaggttggcaatgctatcgaggccctctggagggacgctggcgtccagagctgctttaagaggtcaagggaataccaattgaacgactcggcaagatactacttcgataacatcgctcgtatcgccgcgcccgactatatgcccaacgaccaggacgttctgcgatcacgtgtcaagacaaccggtattacggaaacgaccttcattattggcgatcttacgtaccgtatgttcgatgtcggtggccagcgtagcgaacgtaagaagtggatccactgcttcgagaacgtcaccaccattcttttcttggtcgccatttccgagtacgatcagttgcttttcgaagatgaaaccgtcaaccgtatgcaggaggcccttactctgttcgattccatctgcaactccaggtggttcatcaagacatccatcattcttttcctcaacaagatcgataggtttaaggagaagttgccggtcagcccgatgaaaaactacttccccgattacgagggtggtgatgactacgctgccgcttgcgactacattctcaaccgcttcgtcagtttgaaccagcacgagaccaagcagatttacacgcatttcacatgcgcgacggataccacacaaattcgtttcgtcatggctgcggtcaatgatatcattatccaggagaacctgcgtctctgcggtttgatttga

SEQ ID NO: 468 - protein, 353 aa, Emericella nidulans
MGCGMSTEEKEGKARNEEIENQLKRDRMQQRNEIKMLLLGARESGKSTILKQMKLIHEGGYSRDERESFKEIIFSNTVQSMRVILEAMESLELPLADQRVEYHVQTIFMQPAQIEGDVLPPEVGNAIEALWRDAGVQSCFKRSREYQLNDSARYYFDNIARIAAPDYMPNDQDVLRSRVKTTGITETTFIIGDLTYRMFDVGGQRSERKKWIHCFENVTTILFLVAISEYDQLLFEDETVNRMQEALTLFDSICNSRWFIKTSIILFLNKIDRFKEKLPVSPMKNYFPDYEGGDDYAAACDYILNRFVSLNQHETKQIYTHFTCATDTTQIRFVMAAVNDIIIQENLRLCGLI

SEQ ID NO: 469 - DNA, 1062 bp, Ustilago maydis
atgggttgcggtgcttccaaggtcgacaaggaggggcaggcgcgcaacgatgccattgatgcacagctgaaaaaagaccgtctcgcgcagaagaacgagatcaagatgcttcttctcggtgcccgtgaatcaggcaaatccaccatcctcaaacagatgaaactcatcaaccatggctcctactcggcagaagagcgcgagtcgtacaaggagatcatcttttccaacacagtccagtcgatgcgcgtcttgctcgatgccatggagcgtctcgacatccctctcgccgacggcacaaacgcaccacgcgccgagatcatcctcggtctttcgcccagcattgaatcctcggtgcttccgagacaagtcgccgacgccattcatggcctctgggccgacgcaggtgtccaggcgtgtttcgcgcgaagtcgcgagtaccagctcaacgattcggccaagtactactttgattcgatccaacgcatggcggaaccgagctacctgcccaccgaccaagatgtattgcgctcgcgtgtaaagacgaccggtatcacggagacgcactttaagattggcgagctcaactacaaactctttgacgtcggaggccagcgttccgagcgcaaaaagtggatccactgctttgaaaacgtcaccgccattatctttctggtcgccatctcggaatacgatcagcttctgtacgaggatgagaatgtgaaccgtatgcaggaggcgttgacgttgttcgacagcatctgcaactcgcgctggttcgtcaagacttcgatcatcctgttccttaacaagatcgacctgttcaagcaaaagctgcccatctctcctatggccgactactttagcgactatacgggcggagcggattacaattcagcgtgcgagtacattgtcaatcgctttgtcagcttgaaccagagcgatgccaagacgatctatacgcactttacctgtgccaccgacacaagccagatcaagtttgtcatgtcggcagtcaacgatatcattattcaggtcaacctgcgcgattgcggtttgctctag

SEQ ID NO: 470 - protein, 353 aa, Ustilago maydis
MGCGASKVDKEGQARNDAIDAQLKKDRLAQKNEIKMLLLGARESGKSTILKQMKLINHGSYSAEERESYKEIIFSNTVQSMRVLLDAMERLDIPLADGTNAPRAEIILGLSPSIESSVLPRQVADAIHGLWADAGVQACFARSREYQLNDSAKYYFDSIQRMAEPSYLPTDQDVLRSRVKTTGITETHFKIGELNYKLFDVGGQRSERKKWIHCFENVTAIIFLVAISEYDQLLYEDENVNRMQEALTLFDSICNSRWFVKTSIILFLNKIDLFKQKLPISPMADYFSDYTGGADYNSACEYIVNRFVSLNQSDAKTIYTHFTCATDTSQIKFVMSAVNDIIIQVNLRDCGLL

SEQ ID NO: 471 - DNA, 1062 bp, Ustilago maydis
atgggttgcggtgcttccaaggtcgacaaggaggggcaggcgcgcaacgatgccattgatgcacagctgaaaaaagaccgtctcgcgcagaagaacgagatcaagatgcttcttctcggtgccggtgaatcaggcaaatccaccatcctcaaacagatgaaactcatcaaccatggctcctactcggcagaagagcgcgagtcgtacaaggagatcatcttttccaacacagtccagtcgatgcgcgtcttgctcgatgccatggagcgtctcgacatccctctcgccgacggcacaaacgcaccacgcgccgagatcatcctcggtctttcgcccagcattgaatcctcggtgcttccgagacaagtcgccgacgccattcatggcctctgggccgacgcaggtgtccaggcgtgtttcgcgcgaagtcgcgagtaccagctcaacgattcggccaagtactactttgattcgatccaacgcatggcggaaccgagctacctgcccaccgaccaagatgtattgcgctcgcgtgtaaagacgaccggtatcacggagacgcactttaagattggcgagctcaactacaaactctttgacgtcggaggcctgcgttccgagcgcaaaaagtggatccactgctttgaaaacgtcaccgccattatctttctggtcgccatctcggaatacgatcagcttctgtacgaggatgagaatgtgaaccgtatgcaggaggcgttgacgttgttcgacagcatctgcaactcgcgctggttcgtcaagacttcgatcatcctgttccttaacaagatcgacctgttcaagcaaaagctgcccatctctcctatggccgactactttagcgactatacgggcggagcggattacaattcagcgtgcgagtacattgtcaatcgctttgtcagcttgaaccagagcgatgccaagacgatctatacgcactttacctgtgccaccgacacaagccagatcaagtttgtcatgtcggcagtcaacgatatcattattcaggtcaacctgcgcgattgcggtttgctctag

SEQ ID NO: 472 - protein, 353 aa, Ustilago maydis
MGCGASKVDKEGQARNDAIDAQLKKDRLAQKNEIKMLLLGAGESGKSTILKQMKLINHGSYSAEERESYKEIIFSNTVQSMRVLLDAMERLDIPLADGTNAPRAEIILGLSPSIESSVLPRQVADAIHGLWADAGVQACFARSREYQLNDSAKYYFDSIQRMAEPSYLPTDQDVLRSRVKTTGITETHFKIGELNYKLFDVGGLRSERKKWIHCFENVTAIIFLVAISEYDQLLYEDENVNRMQEALTLFDSICNSRWFVKTSIILFLNKIDLFKQKLPISPMADYFSDYTGGADYNSACEYIVNRFVSLNQSDAKTIYTHFTCATDTSQIKFVMSAVNDIIIQVNLRDCGLL

SEQ ID NO: 473 - DNA, 1077 bp, Penicillium chrysogenum
atggttcttctcaaaaagcatttgaaagatgtcaaccgtgaggatcagaggcaaatgccgaggcaacggctgccatctattcaagaaatatttggggagacttttctggcgattccttcaaatccatcatatgcactgccttctcacaccagacatgccgctccaccggctttgccggctgtgtatgaaattgcccattcaatcgaaggggctccgtcaaatgagcaaggtttattacccaaaatttcaacagtggagagatctttgggcattatctctcccgtcaatgagctccagcatccggaggtaatacgcccggaaaatccatccttctctccgaacggttgttctcttaacgaaagccgtcgcttttcaaagcacccggacctatctatacctcaaccgggtttattgtcatgcgatcccatggatttagcacagccgtcctttgtcgaacctccaaatgtgtttcatggatttcccatcaggaaaataccaaactcgataccgcctcagccaaagcagttatgtctgccggaaaaacgaacaccgagttctcttgatttcagtctgttttttaaggtgatcgagacagtcagcgcacagaccttggctttcgtgcggtatcactccgcaatgagtcagtcagacaaccatcaaagatccctccctggactatctatcactgagataaatggcctcctcagtcaggagcagcaaaagcaggatgtcttgatttatattagggatgaacttgtgcgcttcgaccaataccaagccttagcgcagcagaatactcgggcagccgcatgtatggcgggtggggctgaccgaggtctttgttcatcagtcactaaacagagcaagacccataaagtctctaaacaaaaaagagaatggcacggggatagtgctcttcgttgtcatagctgcaaccgttctgaaacaccagaatggcgtcgtggtccggacggcccccgaactctttgtaacgcctgtggtttacattatgcaaaattgtctcgacgaacgggcaaatttgtggcgttggacgatattggcatcaggggcaaaaca

SEQ ID NO: 474 - protein, 359 aa, Penicillium chrysogenum
MVLLKKHLKDVNREDQRQMPRQRLPSIQEIFGETFLAIPSNPSYALPSHTRHAAPPALPAVYEIAHSIEGAPSNEQGLLPKISTVERSLGIISPVNELQHPEVIRPENPSFSPNGCSLNESRRFSKHPDLSIPQPGLLSCDPMDLAQPSFVEPPNVFHGFPIRKIPNSIPPQPKQLCLPEKRTPSSLDFSLFFKVIETVSAQTLAFVRYHSAMSQSDNHQRSLPGLSITEINGLLSQEQQKQDVLIYIRDELVRFDQYQALAQQNTRAAACMAGGADRGLCSSVTKQSKTHKVSKQKREWHGDSALRCHSCNRSETPEWRRGPDGPRTLCNACGLHYAKLSRRTGKFVALDDIGIRGKT

SEQ ID NO: 475 - DNA, 2406 bp, Aspergillus nidulans
atgaccgcccccattaccgacgtcagcctgggggacgagctccacttagacggcgaggacgtggcgatggcgcatgccgacgcgctagacgatttcgatctggacatgttgggggacggggattccccgggtccgggatttaccccccacgactccgccccctacggcgctctggatatggccgacttcgagtttgagcagatgtttaccgatgccctgggcattgacgactttgggggaatcgatacaagtttgtacaaaaaagcaggctccacaatggatcctagaaaccatccctctcggcctccgtctaccagtctgcctcaaggatcggcgcctcttccttctgctcccatctcgagcatgccaatgcctcagtacacgatgcagcctcagtacccagtctctcagccgcacaccctgcctcctctgcaaccccatcatagccagtcgcccgctcctcactcgtacatggggcagccgccgtaccggcctgatctgaacaggtaccccgcatcaagtcacgatgtttacgcgtcttctgctgcgccgataatgccccacactaccgtgggcagcttgcctccgacatctttcctttctcatcccaatccgcaggcgcaggcacaggcgcagcaatcgccgcactatcctcctcctcatagcgtgctcccgcccgcttccagcgctcagtcgtacccgcagccaattgcgccggcgcctccccgggaccgtcgtgctgacttcaacaatggacttccttcaggagcattcagttattcggacggaaagcctcaaggttgggaccccgttgctgcgaatggtgctgcgccgtatcccgggaaggactccccccgaacccaggttgttggttctcaggggcgacgcggtatccttccgagtgttccgggacgcgcaactccggtcacaaatggtgttaacggcaccggcaagaacactactatcccggccaaggatgccgatggaaagttcccttgcccgaactgtaacaagacttatcttcatgccaagcatctcaagcgccatctgctacgccacactggtgaccgcccgtacatgtgtgttctttgcaaagacaccttctctcgcagtgatatcctgaaacgtcatttccaaaaatgctcaatcaggcgtggtaaccccaccggagcaacgcacttgtcgcaccccaatgcgcatgtgaagaggtcccaacagcaggctgcggcgaatcctgtaaaacctgtccaggatgaagtcagtagtaccgtcccgcctcccaatggcatcccgggcacgacttacggcgagggagccgtcaacggcaatggactagctccggcccggccagggtacgcggatcaccagactatgggcttcccaatgtcatccgtcaacgggatgggccgtggtcagcctgaagacgcgtttcccggcggccggccgcatcaaggagccccttggccacaagctcccaagcagagcccgtatctcgtgcagccgggtgctgacccttctggccaccagttgaatattgaccgaaacatcgagcaggtaaaacaaccggttgttcaagaccccaagcgccctgtgatgccaggacatcccggccaccccggtgagcttgactggacgtctatgttccaacctcaagctcccgagggctacatgttctcccagtctatgcctggtggtcaagagcccatccacgctcatgtcgagaccgagcgaaagtattaccccaccactaccgctggtcaagagagtggaatgaacggtctctatctggcttcgactatgagtggcgacggcaccgttcagcccgccagacaatagatgcgaattaaatcgacattcgggggtcaccgcgtgtcctgtattttactccgcttgagttcttattcgtcaaaaatagatttacgctttcctgtttctacaaccaaagacgctgcgatttccgagtacgttacgaagaggtcggaatactcaacggggtcagaccagcatgcatactctcaacatgatatttttcttcgatttcccagcaacattcagttacgaaaacgatttctctatccgtgggtatctggccaagtttgtttgattttcttcagcttgtcaaaaaatcgtttcagcattttccaacggcgagtgcggtatcatgagtggccgatggtacggggtgtggtttatccggcgtccaactatagactcgggcatgtttcttgtgtttgcgattctggttcctctcgtttttctcttccaaatacggccaaaggatctctttctcgcggaaggcttctgtcgactatcgattccgatccacatgtgtgttcgggcgttatttgcataaatttacggccgtttcaaccacatgttcttttccgttcaaaacgatgtaagtag

SEQ ID NO: 476 - protein, 800 aa, Aspergillus nidulans
MTAPITDVSLGDELHLDGEDVAMAHADALDDFDLDMLGDGDSPGPGFTPHDSAPYGALDMADFEFEQMFTDALGIDDFGGIDTSLYKKAGSTMDPRNHPSRPPSTSLPQGSAPLPSAPISSMPMPQYTMQPQYPVSQPHTLPPLQPHHSQSPAPHSYMGQPPYRPDLNRYPASSHDVYASSAAPIMPHTTVGSLPPTSFLSHPNPQAQAQAQQSPHYPPPHSVLPPASSAQSYPQPIAPAPPRDRRADFNNGLPSGAFSYSDGKPQGWDPVAANGAAPYPGKDSPRTQVVGSQGRRGILPSVPGRATPVTNGVNGTGKNTTIPAKDADGKFPCPNCNKTYLHAKHLKRHLLRHTGDRPYMCVLCKDTFSRSDILKRHFQKCSIRRGNPTGATHLSHPNAHVKRSQQQAAANPVKPVQDEVSSTVPPPNGIPGTTYGEGAVNGNGLAPARPGYADHQTMGFPMSSVNGMGRGQPEDAFPGGRPHQGAPWPQAPKQSPYLVQPGADPSGHQLNIDRNIEQVKQPVVQDPKRPVMPGHPGHPGELDWTSMFQPQAPEGYMFSQSMPGGQEPIHAHVETERKYYPTTTAGQESGMNGLYLASTMSGDGTVQPARQMRIKSTFGGHRVSCILLRLSSYSSKIDLRFPVSTTKDAAISEYVTKRSEYSTGSDQHAYSQHDIFLRFPSNIQLRKRFLYPWVSGQVCLIFFSLSKNRFSIFQRRVRYHEWPMVRGVVYPASNYRLGHVSCVCDSGSSRFSLPNTAKGSLSRGRLLSTIDSDPHVCSGVICINLRPFQPHVLFRSKRCK

SEQ ID NO: 477 - DNA, 846 bp, Penicillium chrysogenum
atgaccgcccccattaccgacgtcagcctgggggacgagctccacttagacggcgaggacgtggcgatggcgcatgccgacgcgctagacgatttcgatctggacatgttgggggacggggattccccgggtccgggatttaccccccacgactccgccccctacggcgctctggatatggccgacttcgagtttgagcagatgtttaccgatgccctgggcattgacgactttgggggaatcgatacaagtttgtacaaaaaagcaggctccacaatgacggagaaccacaccccttctactacgcagccgacgttgcctgcgcctgttgctgaagccgcgccgatccaagcaaacccggctccttctgcctcagtcacggcgactgctgccgccgctactgcggcggtgaacaacgccccctctatgaacggcgccggtgagcagttgccttgccagtgggttggttgcacggagaagtcccccactgccgagtctctatatgagcatgtttgcgagcgtcatgttggacgtaaaagcaccaacaacctcaacctgacctgccagtggggcacttgcaacaccacaacagtcaagcgtgatcatatcacctcccacatccgcgttcatgtgccacttaagccgcacaaatgcgacttttgtggtaaggctttcaagcgcccccaggatttgaagaagcatgtcaagactcatgcggacgactccgagatccgctcccccgaaccgggcatgaagcaccctgatatgatgttcccccaaaaccctaagggttacgctgctgccacacattacttcgaaagccctatcaacggcatcaatgggtag

SEQ ID NO: 478 - protein, 281 aa, Penicillium chrysogenum
MTAPITDVSLGDELHLDGEDVAMAHADALDDFDLDMLGDGDSPGPGFTPHDSAPYGALDMADFEFEQMFTDALGIDDFGGIDTSLYKKAGSTMTENHTPSTTQPTLPAPVAEAAPIQANPAPSASVTATAAAATAAVNNAPSMNGAGEQLPCQWVGCTEKSPTAESLYEHVCERHVGRKSTNNLNLTCQWGTCNTTTVKRDHITSHIRVHVPLKPHKCDFCGKAFKRPQDLKKHVKTHADDSEIRSPEPGMKHPDMMFPQNPKGYAAATHYFESPINGING

SEQ ID NO: 479 - DNA, 1410 bp, Aspergillus terreus; identical to SEQ ID NO: 181

SEQ ID NO: 480 - protein, 469 aa, Aspergillus terreus; identical to SEQ ID NO: 182

SEQ ID NO: 481 - DNA, 1065 bp, Ustilago maydis
atgggaaactgtctttcttcctctgatcaaaaggaggccaaggatcggagcgtcgccatcgacaagcagatcgaagaggatagccgcaaattcaagaaggagtgcaaaatccttcttcttggttcgggagagtcaggcaaatcgaccatcgtcaagcagatgaagatcatccatcaaaatggctacaccaaggacgaattgttactctatcgactcaccgtcatcaaaaacctggttgattcggcacaagccatggttctggctctgcgaaagttcaagatggagcccgagatgcccgagaaccgcgaaaacgtagatgccattctgcaataccgtgtcgacgccgatccaggagcaacgctcgatcacgccatggcgagaaaggtcgactcactctggaaggatcccatcgtccctgcgatcatggagcgcagcagcgaattctaccttatggatagtgccgcctactttttcgataatgtcaaccgcattggccagtccgactacgtgcccaacgagaacgacgttcttcgtgcacgatccaaaaccactggtattagcgagactcggttcaatatgggacagctttcaatacatctctttgacgtaggaggacagcgttcggaacgtaaaaagtggatccactgctttgaagcggtgacgtcgatcatcttttgcgtggcgctgagcgagtacgaccaggtgctgttggaggaaagcggccaaaaccgtatggccgagtcgctcgttctatttgaatcggtagtcaacagtcgttggttcctgcgcacctccgtcatcctctttctcaacaagattgacattttcaagcaaaagattccaaaacagccgctatcgaaatactttccagagtacagcggcgggccggacatcaataaggcggccaaatacattctttggcgttttacacagaccaatcgagcacgtttgagcatctacccacatctcacgcaggccacggacacgagtaatattcgcctcgtctttgcagcggtcaaagagacgattctcaccaacgcgctcaaggacagcggcatcttgtag

SEQ ID NO: 482 - protein, 354 aa, Ustilago maydis
MGNCLSSSDQKEAKDRSVAIDKQIEEDSRKFKKECKILLLGSGESGKSTIVKQMKIIHQNGYTKDELLLYRLTVIKNLVDSAQAMVLALRKFKMEPEMPENRENVDAILQYRVDADPGATLDHAMARKVDSLWKDPIVPAIMERSSEFYLMDSAAYFFDNVNRIGQSDYVPNENDVLRARSKTTGISETRFNMGQLSIHLFDVGGQRSERKKWIHCFEAVTSIIFCVALSEYDQVLLEESGQNRMAESLVLFESVVNSRWFLRTSVILFLNKIDIFKQKIPKQPLSKYFPEYSGGPDINKAAKYILWRFTQTNRARLSIYPHLTQATDTSNIRLVFAAVKETILTNALKDSGIL

SEQ ID NO: 483 - DNA, 2373 bp, Saccharomyces cerevisiae; identical to SEQ ID NO: 183

SEQ ID NO: 484 - protein, 790 aa, Saccharomyces cerevisiae; identical to SEQ ID NO: 184

SEQ ID NO: 485 - DNA, 2229 bp, Aspergillus terreus; identical to SEQ ID NO: 25

SEQ ID NO: 486 - protein, 742 aa, Aspergillus terreus; identical to SEQ ID NO: 26

SEQ ID NO: 487 - DNA, 1380 bp, Yarrowia lipolytica
atgtgtgtggactcttgtgttcagagatcgtcgttgccccatttgtcccggccacctggcaacttgcacaaaataattaactccgatatatatatatatatcaagccacatgccccaacccccctacttgtagcttttgcacccacaccccatccatccacaaccacttccccattcggccaaggtctgcaccaagcgcatcgccaacgcgtagcgtctctcccaacgtacggtaaaaccacaaccttcaacctgccagacaatagaccgataaaaacggtacattgtccatcgtgtgaacatgtctgtcgacctcaaacccaagacgctgaagcgcaaaaacttcaagaagctgtcactcaacgccgacgccggagtggcgccccaggcaacagcttcccctccgccatcacagcccttcaccctcgacaaacccacgctcccagagagcggccctcagcaaggcaacctgataagccaaatgggaatcgctgggagctgggcgtggagttcaaaatcgacatccgggctcaggatctgcgcaccatacaggagctgggcgccgggaacggcgggtcggtctcccgggtggaacacatccccactggtgccgtcatggccaagaaggtgatccatatcggaggcaaagaggccgtgcgacgccagattttgcgggagctgcacattatgcacgagtgcgactcgccctacattgtctccttctacggcgccttcatcaacgagtcgtccggcgacgtggtcatgtgcatggagtttatggactgcggccacttggaccgcatctacaagaaggccggcccgctgaccgaagagattgtcggccatatcaccgtggccgtcgtcgagggcctaacgtatctatacaacgagcaccgcatcgtccacagagacgtcaagccgtccaacattctcgtcaactcccatggccagatcaagctgtgcgactttggagtgtctggcgagctcatcaactccatcgcagacacctttgttggcacctcaacgtacatgtcacccgaacgaatccagggaggaaactacactgtcaagtccgacgtgtggtcgcttggcatctcgctgctggagttgctgctgggaaagttcccctttgacatggctaacggagctgtgggacccatgggtattcttgatctgctgcagcgaatcgtcaacgaacctccgccaacccttccggcagaagacaccaggttctcgcccgtgtgcagacggtttgtcgaccggtgtctgtataaggaggccgagcgtccttcccctcagcagctcatcaacgatgcctttatcatcacgtctcgggccaagcaggttgacatgaaggcctgggccatgagcgtgcagtag

SEQ ID NO: 488 - protein, 459 aa, Yarrowia lipolytica
MCVDSCVQRSSLPHLSRPPGNLHKIINSDIYIYIKPHAPTPLLVAFAPTPHPSTTTSPFGQGLHQAHRQRVASLPTYGKTTTFNLPDNRPIKTVHCPSCEHVCRPQTQDAEAQKLQEAVTQRRRRSGAPGNSFPSAITALHPRQTHAPRERPSARQPDKPNGNRWELGVEFKIDIRAQDLRTIQELGAGNGGSVSRVEHIPTGAVMAKKVIHIGGKEAVRRQILRELHIMHECDSPYIVSFYGAFINESSGDVVMCMEFMDCGHLDRIYKKAGPLTEEIVGHITVAVVEGLTYLYNEHRIVHRDVKPSNILVNSHGQIKLCDFGVSGELINSIADTFVGTSTYMSPERIQGGNYTVKSDVWSLGISLLELLLGKFPFDMANGAVGPMGILDLLQRIVNEPPPTLPAEDTRFSPVCRRFVDRCLYKEAERPSPQQLINDAFIITSRAKQVDMKAWAMSVQ

SEQ ID NO: 489 - DNA, 1581 bp, Saccharomyces cerevisiae; identical to SEQ ID NO: 239

SEQ ID NO: 490 - protein, 526 aa, Saccharomyces cerevisiae; identical to SEQ ID NO: 240

SEQ ID NO: 491 - DNA, 2777 bp, Neurospora crassa
atgagctcaccacccacacccggatccaaccacggacatggaacggaaggaagtggcaggcccagctcccgcccagagaaacgcacctgcatcacctgccgcgctcgcaaagtcaaatgcgatggccggccagacaagtgcaccaactgcgagcggctaggcttcacctgctcttacgaccccaacaccatcgtcaccacgagcatcaacgccggcgtgggagctagtcacgcagtcacctcccatgaacccttttccgtcgacaggctggccccaacagagacagagggaaacgtatccaccggtgccaccacgatagcaccagtggtgggattaaggaggatcagagcccgacaggcttgtcagagttgtcatgtcaagaaagccaagtgctccggaatcatcaacaaatcggggccaggcggaagcggaagcggcggtcatcggggctgcgaacgatgccgggctctaggaattgcatgtgtccttaggaagggcaagcgaggtctagctctaccaggaattaacaactcctccctcggcgacgccaacgaaatggttctggacgacggaggcaacggcatgcatctcgacgacccccgagacttagacgacgacatgaatcaccacaatggtaacggcagcataggtagccggagcaccgccagtcccgctcccatccctagcaacaacccaggagcatccggccgcatcgacctctcccaacccgacgatccgatagtcaagcgcgcgtttgacaactatttccgacacgtccaccacctgcccatgttcacattccttcaccgcgcttcgctgatggaacgctacgacgccggcctgctcgaccgggccctgctgctcgccatcgtcggcatcgccgcgttactaaccgaccttggcccctccgtctccgttgccgacccagaattattttccaaccgatgcatcgacgaggctgcctccatttgcacatccgaactagaaaacaaaagcattacccgcctcgaggctttggtaatcgtcgtcaagcatcgaattctgtcaaaacgcttttcggcagccttcatgctacacgcacttacttcgcgattcgcaaacgttctccgactaaacgttgagaacccagccctctgctttctcgcccaggaatcccgccgcagactcatgtggtccatctatatgatcgacgcttggttcgccaacgggcagaccgaactcgccctctggccggatccagaacgacaaatccgcgttcaattgccatgcaacgagcgtaactttgacttcgatttgccggaagtcaccgaaccactgcgccaaccattacccggtccatccggacaaccaatccagctccccgacgctgtgggattcacggctttgcacatccgtatgcactggctacggacacggatcctccagctttcgctgcgcgtcgtgggggctaaccccgacccgaacgagctgatgcaactcccgctcaggtgcgcggagttcaaagcggagctggactcgttcgaagcgagactgccgtcttcgttccggtggagtgagtcgaatctccggttacggtcctactctacgaggctgggcatctttttcgtgacacatgtctggtggaggcagtgccacttggacttgtatcgactcttcttaccaggactgaaggaggcattgtcggcaagtagtctggcgcagttggctgggagcgctgtgagtagtcctgcggctcaaggacaaggacagtggcagggacagaatggccagagacaaggactggtggaatgggcaagacaagagtgttataaacatgccagggcaatggcggatatgtttgctcaagtcctggctttgggggagagtagtgtgccgttgggggatgtggatctgtccgggtgcgccttgcagtgtggacgtgtgttgtatcattccttccaaactcgcgaaaggggtcagtcgccggctccgtcggcggagggggtaagggagatggtcagtgtttgtttgagggtagcgagattggcgtgtccggggccggcgagtagggctattgtgagttttccccttttcacctttccttccattattttccttaccttttctctcctttccgacactttttctacccccagccaagtacacgaacgatgctgacatccacaaagcaaaccgacatcgaaaaactcttagctgaaggcctccccatcaaccaagtacaagttcctcagactcctcgacccaacgatctcctaacacccactcccgcgcccttctctcccggcccaccatttgtcgccatggccggtcccatccccttgatcaacaactcgcacgaactcagcccctctcaaagtttactacaaccagcaatggcaccacccgtcccaccgcatgctcaacaagcacaacaaccaacatcccacatgcttccacccctctccagctccgcaccgcccccactgcaagtaggtccaggaagtgtgaacccaggtattgcaccctcccaagcctccgccataaccaccggctccaacgcctttgaagagatactgaatgtgaacggcatcaatttcggcggggtcggtatgggcatgactgagttctttgctccagacgcatgggggttgggactgtcgccgtttccgatggggttgggtggtggtgactggacggtacaagggcagggacaggggcaggaacatggacaagaacaggggcagggtaatggaaatgggaatgggaatggacagcaatttcatggggaccatggttga

SEQ ID NO: 492 - protein, 898 aa, Neurospora crassa
MSSPPTPGSNHGHGTEGSGRPSSRPEKRTCITCRARKVKCDGRPDKCTNCERLGFTCSYDPNTIVTTSINAGVGASHAVTSHEPFSVDRLAPTETEGNVSTGATTIAPVVGLRRIRARQACQSCHVKKAKCSGIINKSGPGGSGSGGHRGCERCRALGIACVLRKGKRGLALPGINNSSLGDANEMVLDDGGNGMHLDDPRDLDDDMNHHNGNGSIGSRSTASPAPIPSNNPGASGRIDLSQPDDPIVKRAFDNYFRHVHHLPMFTFLHRASLMERYDAGLLDRALLLAIVGIAALLTDLGPSVSVADPELFSNRCIDEAASICTSELENKSITRLEALVIVVKHRILSKRFSAAFMLHALTSRFANVLRLNVENPALCFLAQESRRRLMWSIYMIDAWFANGQTELALWPDPERQIRVQLPCNERNFDFDLPEVTEPLRQPLPGPSGQPIQLPDAVGFTALHIRMHWLRTRILQLSLRVVGANPDPNELMQLPLRCAEFKAELDSFEARLPSSFRWSESNLRLRSYSTRLGIFFVTHVWWRQCHLDLYRLFLPGLKEALSASSLAQLAGSAVSSPAAQGQGQWQGQNGQRQGLVEWARQECYKHARAMADMFAQVLALGESSVPLGDVDLSGCALQCGRVLYHSFQTRERGQSPAPSAEGVREMVSVCLRVARLACPGPASRAIPSTRTMLTSTKQTDIEKLLAEGLPINQVQVPQTPRPNDLLTPTPAPFSPGPPFVAMAGPIPLINNSHELSPSQSLLQPAMAPPVPPHAQQAQQPTSHMLPPLSSSAPPPLQVGPGSVNPGIAPSQASAITTGSNAFEEILNVNGINFGGVGMGMTEFFAPDAWGLGLSPFPMGLGGGDWTVQGQGQGQEHGQEQGQGNGSGNGNGQQFHGDHG

SEQ ID NO: 493 - DNA, 2628 bp, Saccharomyces cerevisiae
atgtcactgaacaacataacattctgtgtctcacaggatctggatgttcccctgaaagtgaaaatcaagtcattggaaggacataagccactgttgaagccatctcaaaaaatcctgaaccctgaattaatgctgatagggtcaaatgtattcccttctagtgatctaattgtatccttacaggtatttgataaagagagaaacagaaatttaactcttccgatatacacgccgtatattcctttcagaaactctagaacctgggattattggttgactttgcccatacgtatcaaacagcttacctttagcagtcatttacgcattattttgtgggaatacaatggatccaagcaaattccctttttcaatctagaaacgagcatctttaacttaaaagactgtactttaaaaagagggtttgaatccttaaaatttcgttatgatgtgattgaccactgtgaagtggtcactgataacaaagatcaagaaaatttgaataaatattttcagggtgaattcacgagactcccttggcttgacgaaatcactataagcaaattaaggaaacaacgggaaaataggacttggcctcagggcacctttgtcttaaacttagaatttccaatgttagagcttcctgttgtgttcatcgaaagggaaattatgaatactcaaatgaatattccaactttgaagaacaatcctggactaagcacagacttacgagaaccgaataggaatgatcctcaaatcaaaatttctttgggggacaaatatcactccacattgaagttttacgatcctgaccaaccaaacaatgatccaatagaggaaaagtataggagattggaaagagcatctaaaaatgcaaacttggacaagcaagtgaagccggacattaaaaagagggactacttgaataaaatcatcaactacccccctggcactaaattaacagcacatgaaaagggttcaatatggaaatataggtattatttgatgaacaataaaaaagctcttacaaagttattacagagtacaaatttgagagaagaatcggaaagagtagaggttttagaactaatggactcatgggcagaaattgatatagacgacgcattagaactattaggctcaacttttaaaaacctttcagtgagatcgtacgccgtaaataggctgaagaaggcatcagacaaggagctggaattgtacttattacagttggtagaagctgtctgttttgagaacctgtccactttttccgacaaatctaacagtgaattcactattgtggatgccgtatcttcgcaaaagctttcgggtgattctatgttactatctacatcgcatgccaaccaaaaattattaaagtccatctcgagtgaatcggaaacttccgggacagaatcgctaccaatcgtcatttctcccttggctgagtttttgattaggagagcactggtcaacccaaggttaggaagttttttctattggtatttaaagtccgagtctgaggacaagccatatttagaccagattttaagttccttttggagtagactggataaaaaatctcggaatatactgaacgatcaagtcaggctaataaatgtgctcagggaatgttgtgaaacaattaagaggctgaaagatactacagccaaaaagatggaattactagtgcatttattggagacgaaagtcaggcctcttgtcaaagtacgaccaattgctttaccactagaccctgatgtgttgatatgcgacgtttgtcctgaaacttcgaaggtatttaaaagctctttatcgccactaaaaataacattcaaaacgaccttaaaccaaccatatcacttaatgtttaaggttggcgatgatttgagacaagatcaactggtagtacagatcataagtttaatgaatgagttattaaaaaatgaaaacgtggacttgaaattgacaccatacaaaattttggcaacaggaccacaagaaggtgccattgaatttatccctaatgacacattagctagcatactaagcaaatatcacggtattcttggctaccttaaactccactatcctgatgagaacgcgacattaggcgtacaaggctgggttttagataattttgtcaaatcttgtgctggctattgtgttattacatacatcttaggtgtcggcgataggcatttagacaacttactagtcacgccagatgggcacttttttcacgcagactttggttatatcttgggtcaggaccccaaaccttttccgccattaatgaaattgccccctcaaattatagaggcgtttgggggtgcagaatcatcaaattatgataaatttcgcagctactgttttgtggcatattcgattttaagaaggaatgcaggcttaatcttaaacctgtttgaattaatgaagacttcgaacatacctgatatcagaatagatcccaatggtgctatattacgtgtaagagagagatttaatttgaatatgtccgaagaagatgccacagtgcattttcagaatctaatcaatgatagtgtaaatgctttgctgcctatcgtgattgatcatttacataatctggcacaatactggcggacctga

SEQ ID NO: 494 - protein, 875 aa, Saccharomyces cerevisiae
MSLNNITFCVSQDLDVPLKVKIKSLEGHKPLLKPSQKILNPELMLIGSNVFPSSDLIVSLQVFDKERNRNLTLPIYTPYIPFRNSRTWDYWLTLPIRIKQLTFSSHLRIILWEYNGSKQIPFFNLETSIFNLKDCTLKRGFESLKFRYDVIDHCEVVTDNKDQENLNKYFQGEFTRLPWLDEITISKLRKQRENRTWPQGTFVLNLEFPMLELPVVFIEREIMNTQMNIPTLKNNPGLSTDLREPNRNDPQIKISLGDKYHSTLKFYDPDQPNNDPIEEKYRRLERASKNANLDKQVKPDIKKRDYLNKIINYPPGTKLTAHEKGSIWKYRYYLMNNKKALTKLLQSTNLREESERVEVLELMDSWAEIDIDDALELLGSTFKNLSVRSYAVNRLKKASDKELELYLLQLVEAVCFENLSTFSDKSNSEFTIVDAVSSQKLSGDSMLLSTSHANQKLLKSISSESETSGTESLPIVISPLAEFLIRRALVNPRLGSFFYWYLKSESEDKPYLDQILSSFWSRLDKKSRNILNDQVRLINVLRECCETIKRLKDTTAKKMELLVHLLETKVRPLVKVRPIALPLDPDVLICDVCPETSKVFKSSLSPLKITFKTTLNQPYHLMFKVGDDLRQDQLVVQIISLMNELLKNENVDLKLTPYKILATGPQEGAIEFIPNDTLASILSKYHGILGYLKLHYPDENATLGVQGWVLDNFVKSCAGYCVITYILGVGDRHLDNLLVTPDGHFFHADFGYILGQDPKPFPPLMKLPPQIIEAFGGAESSNYDKFRSYCFVAYSILRRNAGLILNLFELMKTSNIPDIRIDPNGAILRVRERFNLNMSEEDATVHFQNLINDSVNALLPIVIDHLHNLAQYWRT

SEQ ID NO: 495 - DNA, 24 bp, Artificial Sequence
  Primer
tggtgtcggtaattcctgcttaac

SEQ ID NO: 496 - DNA, 24 bp, Artificial Sequence
  Primer
gttaagcaggaattaccgacacca
